(19) United States
(12) Patent Application Publication
(10) Pub. No.: US 2018/0112007 A1
(43) Pub. Date: Apr. 26, 2018

(54) HUMANIZED ANTI-MUC1* ANTIBODIES

(71) Applicant: Minerva Biotechnologies Corporation, Waltham, MA (US)

(72) Inventors: Cynthia BAMDAD, Waltham, MA (US); Benoit SMAGGHE, Waltham, MA (US)

(73) Assignee: Minerva Biotechnologies Corporation, Waltham, MA (US)

(21) Appl. No.: 15/549,942

(22) PCT Filed: Feb. 10, 2016
(86) PCT No.: PCT/US2016/017422

§ 371 Date: Aug. 9, 2017

Related U.S. Application Data
(60) Provisional application No. 62/114,526, filed on Feb. 10, 2015.

(51) Int. Cl. C07K 16/30; A61K 39/00

(52) U.S. Cl. CPC C07K 16/3092; A61K 39/0011; C07K 2317/622; A61K 2039/5158; C07K 2317/24; C07K 2319/02; A61K 2039/5156; C07K 2317/34

(57) ABSTRACT

The present application discloses humanized antibodies and antibody like proteins and fragments thereof.

### BACKGROUND OF THE INVENTION

### 1. Field of the Invention

[0001] The present application relates to humanized anti-MUC1* antibodies and methods of making and using them.

### 2. General Background and State of the Art

[0002] We previously discovered that a cleaved form of the MUC1 (SEQ ID NO:1) transmembrane protein is a growth factor receptor that drives the growth of over 75% of all human cancers. The cleaved form of MUC1, which we called MUC1* (pronounced muk 1 star), is a powerful growth factor receptor. Cleavage and release of the bulk of the extracellular domain of MUC1 unmasks a binding site for activating ligands dimeric NME1, NME6 or NME7. It is an ideal target for cancer drugs as it is aberrantly expressed on over 75% of all cancers and is likely overexpressed on an even higher percentage of metastatic cancers (Fessler S P, Wotkowicz M T, Mahanta S K and Bamdad C. (2009). MUC1* is a determinant of trastuzumab (Herceptin) resistance in breast cancer cells. Breast Cancer Res Treat. 118(1):113-124). After MUC1 cleavage most of its extracellular domain is shed from the cell surface. The remaining portion has a truncated extracellular domain that at least comprises the primary growth factor receptor sequence, PSMGFR (SEQ ID NO:2).

[0003] Antibodies are increasingly used to treat human diseases. Antibodies generated in non-human species have historically been used as therapeutics in humans, such as horse antibodies. More recently, antibodies are engineered or selected so that they contain mostly human sequences in order to avoid a generalized rejection of the foreign antibody. The process of engineering recognition fragments of a non-human antibody into a human antibody is generally called ‘humanizing’. The amount of non-human sequences that are used to replace the human antibody sequences determines whether they are called chimeric, humanized or fully human.

[0004] Alternative technologies exist that enable generation of humanized or fully human antibodies. These strategies involve screening libraries of human antibodies or antibody fragments and identifying those that bind to the target antigen, rather than immunizing an animal with the antigen. Another approach is to engineer the variable region(s) of an antibody into an antibody-like molecule. The present invention is intended to also encompass these approaches for use with recognition fragments of antibodies that the inventors have determined bind to the extracellular domain of MUC1*.

[0005] In addition to treating patients with an antibody, cancer immunotherapies have recently been shown to be effective in the treatment of cancers. T-cell based cancer immunotherapy is an attractive approach to overcome the cancer cells evasion from the immune system. A first immunotherapy, called CAR T (chimeric antigen receptor T cell) therapy relies on the expression of a CAR on the surface of the patient T cells for adoptive T-cell therapy (Dai H, Wang Y, Lu X, Han W. (2016) Chimeric Antigen Receptors Modified T-Cells for Cancer Therapy. J Natl Cancer Inst. 108(7): djv439). Such receptor is composed of an anti cancer scFv linked to a T cell transmembrane and signaling domains. Upon binding of the receptor to a cancer associated antigen, a signal is transmitted resulting in T-cell activation, propagation and the targeted killing of the cancer cells. In practice, a patient's T cells are isolated and transduced with a CAR, expanded and then injected back into the patient. When the patient's CAR T cells bind to the antigen on a cancer cell, the CAR T cells expand and attack the cancer cells. A drawback of this method is the risk of activating the patient's immune system to destroy cells bearing the target antigen, when most cancer antigens are expressed on some healthy tissues, but overexpressed on cancerous tissues. To minimize the risk of off-tumor/on-target effects, the cancer antigen should be minimally expressed on healthy tissues.

[0006] A second cancer immunotherapy involves BiTEs (Bi-specific T cell Engagers). The BiTE approach attempts to eliminate the CAR T associated risk of off-tumor/on-target effects. Unlike CAR T, BiTEs are bispecific antibodies that should not pose any greater risk than regular antibody-based therapies. However, unlike typical anti-cancer antibodies that bind to and block a cancer antigen, BiTEs are designed to bind to an antigen on the tumor cell and simultaneously bind to an antigen on an immune cell, such as a T cell. In this way, a BiTE recruits the T cell to the tumor. BiTEs are engineered proteins that simultaneously bind to a cancer associated antigen and a T-cell surface protein such as CD3-epsilon. BiTEs are antibodies made by genetically linking the scFv's of an antibody that binds to a T cell antigen, like anti-CD3-epsilon to a scFv of a therapeutic monoclonal antibody that binds to a cancer antigen (Patrick A. Baeuerle, and Carsten Reinhardt (2009) Bispecific T-cell engaging antibodies for cancer therapy. Cancer Res. 69(12):4941-4944).

### SUMMARY OF THE INVENTION

[0007] In one aspect, the present invention is directed to a human or humanized anti-MUC1* antibody or antibody fragment or antibody-like protein that binds to a region on extracellular domain of MUC1 isoform or cleavage product that is devoid of the tandem repeat domains. The human or humanized anti-MUC1* antibody or antibody fragment or antibody-like protein may specifically bind to

[0008] (i) PSMGFR region of MUC1;

[0009] (ii) PSMGFR peptide;

[0010] (iii) a peptide having amino acid sequence of

(SEQ ID NO: 620)
SNIKFRPGSVVVQLTLAFREGTINVHDVETQFNQYKTEAASRY;

[0011] (iv) a peptide having amino acid sequence of

(SEQ ID NO: 621)
SVVVQLTLAFREGTINVHDVETQFNQYKTEAASRY;

[0012] (v) a peptide having amino acid sequence of VQLTLAFREGTINVHDVETQFNQY (SEQ ID NO:622); or

[0013] (vi) a peptide having amino acid sequence of SNIKFRPGSVVVQLTLAFREGTIN (SEQ ID NO:623).

[0014] The human or humanized antibody may be IgG1, IgG2, IgG3, IgG4 or IgM. The human or humanized antibody fragment or antibody-like protein may be scFv or scFv-Fc.

[0015] The human or humanized antibody, antibody fragment or antibody-like protein as in above may comprise a heavy chain variable region and light chain variable region which is derived from mouse monoclonal MN-E6 antibody, and has at least 80%, 90% or 95% or 98% sequence identity to the mouse monoclonal MN-E6 antibody. The heavy chain variable region may have at least 90% or 95% or 98% sequence identity to SEQ ID NO:13 and the light chain variable region may have at least 90% or 95% or 98% sequence identity to SEQ ID NO:66.

[0016] The human or humanized antibody, antibody fragment or antibody-like protein according to above may include complementarity determining regions (CDRs) in the heavy chain variable region and light chain variable region having at least 90% or 95% or 98% sequence identity to CDR1, CDR2 or CDR3 regions having sequence as follows:

[0017] CDR1 heavy chain SEQ ID NO:17

[0018] CDR1 light chain SEQ ID NO:70,

[0019] CDR2 heavy chain SEQ ID NO:21

[0020] CDR2 light chain SEQ ID NO:74,

[0021] CDR3 heavy chain SEQ ID NO:25

[0022] CDR3 light chain SEQ ID NO:78.

[0023] The human or humanized antibody, antibody fragment or antibody-like protein described above may include a heavy chain variable region and light chain variable region which is derived from mouse monoclonal MN-C2 antibody, and has at least 80%, 90% or 95% or 98% sequence identity to the mouse monoclonal MN-C2 antibody. The heavy chain variable region may have at least 90% or 95% or 98% sequence identity to SEQ ID NO:119 and the light chain variable region has at least 90% or 95% or 98% sequence identity to SEQ ID NO:169. The complementarity determining regions (CDRs) in the heavy chain variable region and light chain variable region may have at least 90% or 95% or 98% sequence identity to CDR1, CDR2 or CDR3 regions having sequence as follows:

[0024] CDR1 heavy chain SEQ ID NO:123

[0025] CDR1 light chain SEQ ID NO:173,

[0026] CDR2 heavy chain SEQ ID NO:127

[0027] CDR2 light chain SEQ ID NO:177,

[0028] CDR3 heavy chain SEQ ID NO:131

[0029] CDR3 light chain SEQ ID NO:181.

[0030] The human or humanized antibody, antibody fragment or antibody-like protein as in above may include a heavy chain variable region and light chain variable region which is derived from mouse monoclonal MN-C3 antibody, and may have at least 80%, 90% or 95% or 98% sequence identity to the mouse monoclonal MN-C3 antibody. The heavy chain variable region may have at least 90% or 95% or 98% sequence identity to SEQ ID NO:414 and the light chain variable region may have at least 90% or 95% or 98% sequence identity to SEQ ID NO:459. The complementarity determining regions (CDRs) in the heavy chain variable region and light chain variable region may have at least 90% or 95% or 98% sequence identity to CDR1, CDR2 or CDR3 regions having sequence as follows:

[0031] CDR1 heavy chain SEQ ID NO:418

[0032] CDR1 light chain SEQ ID NO:463,

[0033] CDR2 heavy chain SEQ ID NO:422

[0034] CDR2 light chain SEQ ID NO:467,

[0035] CDR3 heavy chain SEQ ID NO:426,

[0036] CDR3 light chain SEQ ID NO:471.

[0037] The human or humanized antibody, antibody fragment or antibody-like protein described above may include a heavy chain variable region and light chain variable region which is derived from mouse monoclonal MN-C8 antibody, and has at least 80%, 90% or 95% or 98% sequence identity to the mouse monoclonal MN-C8 antibody. The heavy chain variable region may have at least 90% or 95% or 98% sequence identity to SEQ ID NO:506 and the light chain variable region may have at least 90% or 95% or 98% sequence identity to SEQ ID NO:544. The complementarity determining regions (CDRs) in the heavy chain variable region and light chain variable region may have at least 90% or 95% or 98% sequence identity to CDR1, CDR2 or CDR3 regions having sequence as follows:

[0038] CDR1 heavy chain SEQ ID NO:508

[0039] CDR1 light chain SEQ ID NO:546,

[0040] CDR2 heavy chain SEQ ID NO:510

[0041] CDR2 light chain SEQ ID NO:548,

[0042] CDR3 heavy chain SEQ ID NO:512,

[0043] CDR3 light chain SEQ ID NO:550.

[0044] In another aspect, the present invention is directed to an anti-MUC1* extracellular domain antibody comprised of sequences of a humanized MN-E6 represented by humanized IgG2 heavy chain, or humanized IgG1 heavy chain, paired with humanized Kappa light chain, or humanized Lambda light chain. The humanized IgG2 heavy chain may be SEQ ID NOS:53, humanized IgG1 heavy chain may be SEQ ID NO:57, humanized Kappa light chain may be SEQ ID NO:108, and humanized Lambda light chain may be SEQ ID NO:112, or a sequence having 90%, 95% or 98% sequence identity thereof.

[0045] In another aspect, the invention is directed to an anti-MUC1* extracellular domain antibody comprised of sequences of a humanized MN-C2 represented by humanized IgG1 heavy chain, humanized IgG2 heavy chain, paired with humanized Lambda light chain, and humanized Kappa light chain. The humanized IgG1 heavy chain MN-C2 may be SEQ ID NOS:159 or IgG2 heavy chain may be SEQ ID NOS:164 paired with Lambda light chain (SEQ ID NO:219) or Kappa light chain (SEQ ID NO:213), or a sequence having 90%, 95% or 98% sequence identity thereof.

[0046] In another aspect, the invention is directed to an anti-MUC1* extracellular domain antibody comprised of sequences of a humanized MN-C3 represented by humanized IgG1 heavy chain or humanized IgG2 heavy chain paired with humanized Lambda light chain or humanized Kappa light chain. The humanized MN-C3 IgG1 heavy chain may be SEQ ID NOS:454, IgG2 heavy chain may be SEQ ID NOS:456, Lambda light chain may be SEQ ID NO:501, and Kappa light chain may be SEQ ID NO:503, or a sequence having 90%, 95% or 98% sequence identity thereof.

[0047] In another aspect, the invention is directed to an anti-MUC1* extracellular domain antibody comprised of sequences of a humanized MN-C8 represented by humanized IgG1 heavy chain or humanized IgG2 heavy chain paired with humanized Lambda light chain or humanized Kappa light chain. The humanized MN-C8 IgG1 heavy chain may be SEQ ID NOS:540, IgG2 heavy chain may be SEQ ID NOS:542, Lambda light chain may be SEQ ID NO:580 and Kappa light chain may be SEQ ID NO:582, or a sequence having 90%, 95% or 98% sequence identity thereof.

[0048] In another aspect, the invention is directed to a human or humanized anti-MUC1* antibody or antibody fragment or antibody-like protein according to above, which inhibits the binding of NME protein to MUC1*. The NME may be NME1, NME6, NME7AB, NME7 or NME8.

[0049] In yet another aspect, the invention is directed to a single chain variable fragment (scFv) comprising a heavy and light chain variable regions connected via a linker, further comprising CDRs of antibodies that bind to MUC1* extracellular domain. The CDRs may be derived from MN-E6, MN-C2, MN-C3 or MN-C8 antibodies or humanized antibodies thereof. The scFv may be one that possesses the SEQ ID NOS:233, 235 and 237 (E6); SEQ ID NOS:239, 241, and 243 (C2); SEQ ID NOS:245, 247, and 249 (C3); or SEQ ID NOS:251, 253, and 255 (C8).

[0050] In still another aspect, the invention is directed to a chimeric antigen receptor (CAR) comprising a scFv or a humanized variable region that binds to the extracellular domain of a MUC1 that is devoid of tandem repeats, a linker molecule, a transmembrane domain and a cytoplasmic domain. The single chain antibody fragment may bind to

[0051] (i) PSMGFR region of MUC1,

[0052] (ii) PSMGFR peptide,

[0053] (iii) a peptide having amino acid sequence

(SEQ ID NO: 620)
SNIKFRPGSVVVQLTLAFREGTINVHDVETQFNQYKTEAASRY;

[0054] (iv) a peptide having amino acid sequence of

(SEQ ID NO: 621)
SVVVQLTLAFREGTINVHDVETQFNQYKTEAASRY;

[0055] (v) a peptide having amino acid sequence of VQLTLAFREGTINVHDVETQFNQY (SEQ ID NO:622); or

[0056] (vi) a peptide having amino acid sequence of SNIKFRPGSVVVQLTLAFREGTIN (SEQ ID NO:623).

[0057] In the CAR as describe above, portions of any of the variable regions set forth and described above, or combination thereof may be used in the extracellular domain, a transmembrane region and a cytoplasmic tail that comprises sequence motifs that signal immune system activation. The extracellular domain may be comprised of humanized single chain antibody fragments of an MN-E6 scFv, MN-C2 scFv, MN-C3 scFv or MN-C8 scFv.

[0058] In the CAR as described above, the extracellular domain include humanized single chain antibody fragments of an MN-E6 scFv set forth as SEQ ID NOS: 233, 235, or 237), MN-C2 scFv (SEQ ID NOS:239, 241, or 243), MN-C3 scFv (SEQ ID NOS: 245, 247, or 249) or MN-C8 scFv (SEQ ID NOS:251, 253, or 255).

[0059] In any of the CAR described above, the cytoplasmic tail may be comprised of one or more of signaling sequence motifs CD3-zeta, CD27, CD28, 4-1BB, OX40, CD30, CD40, PD-1, ICAm-1, LFA-1, ICOS, CD2, CD5, or CD7.

[0060] In any of the CAR described above, the sequence may be CARMN-E6 CD3z (SEQ ID NOS:295), CARMN-E6 CD28/CD3z (SEQ ID NOS:298); CARMN-E6 4-1BB/CD3z (SEQ ID NOS:301); CARMN-E6 OX40/CD3z (SEQ ID NOS:617); CARMN-E6 CD28/4-1BB/CD3z (SEQ ID NOS:304); CARMN-E6 CD28/OX40/CD3z (SEQ ID NOS:619); CAR MN-C2 CD3z (SEQ ID NOS:607); CAR MN-C2 CD28/CD3z (SEQ ID NOS:609); CAR MN-C2 4-1BB/CD3z (SEQ ID NOS:611); CAR MN-C2 OX40/CD3z (SEQ ID NOS:613); CAR MN-C2 CD28/4-1BB/CD3z (SEQ ID NOS:307); or CAR MN-C2 CD28/OX40/CD3z (SEQ ID NOS:615).

[0061] In another aspect, the CAR may have an extracellular domain unit that recognizes a peptide. The peptide may be PSMGFR (SEQ ID NO:2). The peptide may be a peptide derived from NME7. The peptide may be

NME7A peptide 1 (A domain):
(SEQ ID NO: 7)
MLSRKEALDFHVDHQS;
NME7A peptide 2 (A domain):
(SEQ ID NO: 8)
SGVARTDASES;
NME7B peptide 1 (B domain):
(SEQ ID NO: 9)
DAGFEISAMQMFNMDRVNVE;
NME7B peptide 2 (B domain):
(SEQ ID NO: 10)
EVYKGVVTEYHDMVTE;
or
NME7B peptide 3 (B domain):
(SEQ ID NO: 11)
AIFGKTKIQNAVHCTDLPEDGLLEVQYFF.

[0062] In another aspect, the invention is directed a composition that includes at least two CARs with different extracellular domain units transfected into the same cell.

[0063] The at least two CARs may have one CAR that does not have a targeting recognition unit and the other CAR does have a targeting recognition unit. Or, one of the extracellular domain recognition units may bind to MUC1* extracellular domain. Or, one of the extracellular domain recognition units may bind PD-1. Or, one of the extracellular domain recognition units is an antibody fragment and the other is a peptide. Or, one is an anti-MUC1* scFv chosen from the group consisting of scFv of MN-E6 antibody, scFv of MN-C2 antibody, scFv of MN-C3 antibody or scFv of MN-C8 antibody and the other is a peptide derived from NME7 or chosen from the group consisting of

NME7A peptide 1 (A domain):
(SEQ ID NO: 7)
MLSRKEALDFHVDHQS;
NME7A peptide 2 (A domain):
(SEQ ID NO: 8)
SGVARTDASES;
NME7B peptide 1 (B domain):
(SEQ ID NO: 9)
DAGFEISAMQMFNMDRVNVE;
NME7B peptide 2 (B domain):
(SEQ ID NO: 10)
EVYKGVVTEYHDMVTE;
or
NME7B peptide 3 (B domain):
(SEQ ID NO: 11)
AIFGKTKIQNAVHCTDLPEDGLLEVQYFF.

[0064] In another aspect, the invention is directed to a cell comprising a CAR with an extracellular domain that binds to MUC1* transfected or transduced cell. The cell that includes the CAR may be an immune system cell, preferably a T cell or dendritic cell or mast cell.

[0065] In another aspect, the invention is directed to an engineered antibody-like protein.

[0066] In another aspect, the invention is directed to a method of screening a library of antibodies or antibody fragments that are human, for those that bind to

[0067] (i) PSMGFR peptide;

[0068] (ii) a peptide having amino acid sequence

(SEQ ID NO: 620)
SNIKFRPGSVVVQLTLAFREGTINVHDVETQFNQYKTEAASRY;

[0069] (iii) a peptide having amino acid sequence of

(SEQ ID NO: 621)
SVVVQLTLAFREGTINVHDVETQFNQYKTEAASRY;

[0070] (iv) a peptide having amino acid sequence of VQLTLAFREGTINVHDVETQFNQY (SEQ ID NO:622);

[0071] (v) a peptide having amino acid sequence of SNIKFRPGSVVVQLTLAFREGTIN (SEQ ID NO:623);

[0072] (vi) NME7 protein; or

[0073] (vii) a peptide fragment of NME7 protein.

[0074] In another aspect, the invention is directed to a method for treating a disease in a subject comprising administering an antibody according to any claim above, to a person suffering from the disease, wherein the subject expresses MUC1 aberrantly. The disease may be cancer, such as breast cancer, lung cancer, colon cancer, gastric cancer.

[0075] In another aspect, the invention is directed to a method for treating a disease in a subject comprising administering an NME peptide, to a person suffering from the disease, wherein the subject expresses MUC1 aberrantly.

[0076] In another aspect, the invention is directed to a method of proliferating or expanding stem cell population comprising contacting the cells with the antibody according to any method or composition described above.

[0077] In another aspect, the invention is directed to a method of facilitating stem cell attachment to a surface comprising coating the surface with a humanized MN-C3 or MN-C8 antibody, antibody fragment or single chain antibody thereof and contacting stem cell to the surface.

[0078] In another aspect, the invention is directed to a method of delivering stem cell in vitro or in vivo comprising the steps of coating a surface with a humanized MN-C3 or MN-C8 antibody, antibody fragment or single chain antibody thereof, contacting the stem cell to the surface and delivering the stem cell to a specific location.

[0079] In another aspect, the invention is directed to a method of isolating stem cell comprising the steps of coating a surface with a humanized MN-C3 or MN-C8 antibody, antibody fragment or single chain antibody thereof, and contacting a mixed population of cells to the surface and isolating stem cell.

[0080] In another aspect, the invention is directed to a scFv comprising variable domain fragments derived from an antibody that binds to a extracellular domain of MUC1 isoform or cleavage product that is devoid of the tandem repeat domains. The variable domain fragments may be derived from mouse monoclonal antibody MN-E6 (SEQ ID NO:13 and 66) or from the humanized MN-E6 (SEQ ID NO: 39 and 94), or from MN-E6 scFv (SEQ ID NO: 233, 235 and 237). Or, the variable domain fragments may be derived from mouse monoclonal antibody MN-C2 (SEQ ID NO: 119 and 169) or from the humanized MN-C2 (SEQ ID NO: 145 and 195), or from MN-C2 scFv (SEQ ID NO: 239, 241 and 243). Or, the variable domain fragments may be derived from mouse monoclonal antibody MN-C3 (SEQ ID NO: 414 and 459) or from the humanized MN-C3 (SEQ ID NO: 440 and 487), or from MN-C3 scFv (SEQ ID NO: 245, 247 and 249). Or, the variable domain fragments may be derived from mouse monoclonal antibody MN-C8 (SEQ ID NO: 505 and 544) or from the humanized MN-C8 (SEQ ID NO: 526 and 566), or from MN-C8 scFv (SEQ ID NO: 251, 253, 255).

[0081] In another aspect, the invention is directed to a method for the treatment of a person diagnosed with, suspected of having or at risk of developing a MUC1 Or MUC1* positive cancer involving administering to the person an effective amount of the scFv described above.

[0082] In another aspect, the invention is directed to a scFv-Fc construct comprising the scFv as described above. The scFv-Fc may be dimerized. Or, the Fc component may be mutated so that scFv-Fc is monomeric. The mutation may include mutating or deleting hinge region on Fc, making F405Q, Y407R, T366W/L368W, and T364R/L368R mutation or combinations thereof on the Fc represented by SEQ ID NO: 281, 279, 285 and 287.

[0083] In another aspect, the invention is directed to a polypeptide comprising at least two different scFv sequences, wherein one of the scFv sequences is a sequence that binds to extracellular domain of MUC1 isoform or cleavage product that is devoid of the tandem repeat domains. The polypeptide may bind to

[0084] (i) PSMGFR region of MUC1;

[0085] (ii) PSMGFR peptide;

[0086] (iii) peptide having amino acid sequence of

(SEQ ID NO: 620)
SNIKFRPGSVVVQLTLAFREGTINVHDVETQFNQYKTEAASRY;

[0087] (iv) a peptide having amino acid sequence of

(SEQ ID NO: 621)
SVVVQLTLAFREGTINVHDVETQFNQYKTEAASRY;

[0088] (v) a peptide having amino acid sequence of VQLTLAFREGTINVHDVETQFNQY (SEQ ID NO:622); or

[0089] (vi) a peptide having amino acid sequence of SNIKFRPGSVVVQLTLAFREGTIN (SEQ ID NO:623).

[0090] The polypeptide may bind to a receptor on an immune cell, such as T cell, and in particular, CD3 on T-cell.

[0091] In another aspect, the invention is directed to a method of detecting presence of a cell that expresses MUC1* aberrantly, comprising contacting a sample of cells with the scFv-Fc described above and detecting for the presence of the binding of scFv-Fc to the cell. The cell may be cancer cell.

[0092] In another aspect, the invention is directed to a method for testing a subject's cancer for suitability of treatment with a composition comprising portions of the variable regions of MN-E6, MN-C2, MN-C3 or MN-C8, comprising the steps of contacting a bodily specimen from the patient with the corresponding MN-E6 scFv-Fc, MN-C3 scFv-Fc, MN-C3 scFv-Fc or MN-C8 scFv-Fc.

[0093] In another aspect, the invention is directed to a method of treating a subject suffering from a disease comprising, exposing T cells from the subject to MUC1* peptides wherein through various rounds of maturation, T cells develop MUC1* specific receptors, creating adapted T cells, and expanding and administering the adapted T cells to the donor patient who is diagnosed with, suspected of having, or is at risk of developing a MUC1* positive cancer.

[0094] These and other objects of the invention will be more fully understood from the following description of the invention, the referenced drawings attached hereto and the claims appended hereto.

### BRIEF DESCRIPTION OF THE DRAWINGS

[0095] The present invention will become more fully understood from the detailed description given herein below, and the accompanying drawings which are given by way of illustration only, and thus are not limitative of the present invention, and wherein;

[0096] FIG. 1 A-D show cell growth assay graphs of MUC1* positive cells treated with either bivalent ‘by’ anti-MUC1* antibody, monovalent ‘my’ or Fab, NM23-H1 dimers or NME7-AB. Bivalent anti-MUC1* antibodies stimulate growth of cancer cells whereas the monovalent Fab inhibits growth (A, B). Classic bell-shaped curve indicates ligand induced dimerization stimulates growth. Dimeric NM23-H1, aka NME1, stimulates growth of MUC1* positive cancer cells but siRNA to suppress MUC1 expression eliminate its effect (C). NME7-AB also stimulates the growth of MUC1* positive cells (D).

[0097] FIG. 2 A-F show results of ELISA assays. MUC1* peptides PSMGFR, PSMGFR minus 10 amino acids from the N-terminus aka N-10, or PSMGFR minus 10 amino acids from the C-terminus, aka C-10 are immobilized on the plate and the following are assayed for binding: NME7-AB (A), MN-C2 monoclonal antibody (B), MN-E6 monoclonal antibody (C), or dimeric NME1 (D). These assays show that NME1, NME7-AB and monoclonal antibodies MN-C2 and MN-E6 all require the first membrane proximal 10 amino acids of the MUC1* extracellular domain to bind. MUC1* peptides PSMGFR minus 10 amino acids from the N-terminus aka N-10, or PSMGFR minus 10 amino acids from the C-terminus, aka C-10, are immobilized on the plate and the following are assayed for binding: MN-C3 (E) and MN-C8 (F).

[0098] FIG. 3 A-C show results of competitive ELISA assays. The PSMGFR MUC1* peptide is immobilized on the plate and dimeric NM23-H1, aka NME1, is added either alone or after the MN-E6 antibody has been added (A). The same experiment was performed wherein NM23-H7, NME7-AB, is added alone or after MN-E6 has been added (B). Results show that MN-E6 competitively inhibits the binding of MUC1* activating ligands NME1 and NME7. In a similar experiment (C), PSMGFR or PSMGFR minus 10 amino acids from the N-terminus, aka N-10, is immobilized on the plate. Dimeric NM23-H1 is then added. Anti-MUC1* antibodies MN-E6, MN-C2, MN-C3 or MN-C8 are then tested for their ability to compete off the NM23-H1. Results show that although all three antibodies bind to the PSMGFR peptides, MN-E6 and MN-C2 competitively inhibit binding of the MUC1* activating ligands.

[0099] FIG. 4 A-F shows FACS scans of anti-MUC1* antibodies binding specifically to MUC1* positive cancer cells and MUC1* transfected cells but not MUC1* or MUC1 negative cells. ZR-75-1, aka 1500, MUC1* positive breast cancer cells were stained with 1:2 or 1:10 dilutions of the 1.5 ug/ml humanized MN-C2. After two washes, cells were stained with secondary antibody, Anti-Penta-His antibody at conjugated to Alexa 488 (Qiagen) dilutions of 1:200 (A), 1:50 (B), or 1:10 (C) to detect the 6×His tag on the huMN-C2 scFv. Flow cytometric analysis revealed a concentration-dependent shift of a subset of cells, indicating specific binding, which is unseen in the absence of the MN-C2 scFv (A-C). In another case, MN-E6 was used to stain MUC1 negative HCT-116 colon cancer cells transfected with the empty vector, single cell clone #8 (D), HCT-116 colon cancer cells transfected with MUC1* single cell clone #10 (E), or ZR-75-1, aka 1500, MUC1* positive breast cancer cells. As the FACS scans show, both MN-C2 and MN-E6 only stain MUC1* positive cells and not MUC1 or MUC1* negative cells.

[0100] FIG. 5 shows a graph of an ELISA in which surface is coated with either the MUC1* PSMGFR peptide or a control peptide. Humanized MN-C2 scFv is then incubated with the surface, washed and detected according to standard methods. The ELISA shows that the huMN-C2 scFv binds to the MUC1* peptide with an EC-50 of about 333 nM.

[0101] FIG. 6 A-B shows graphs of cancer cell growth inhibition by MUC1* antibody variable region fragment humanized MN-C2 scFv. hMN-C2 scFv potently inhibited the growth of ZR-75-1, aka 1500, MUC1* positive breast cancer cells (A) and T47D MUC1* positive breast cancer cells (B) with approximately the same EC-50 as the in vitro ELISAs.

[0102] FIG. 7 A-B shows graphs of tumor growth in immune compromised mice that have been implanted with human tumors then treated with anti-MUC1* antibody MN-E6 Fab or mock treatment. Female nu/nu mice implanted with 90-day estrogen pellets were implanted with 6 million T47D human breast cancer cells that had been mixed 50/50 with Matrigel. Mice bearing tumors that were at least 150 mm³ and had three successive increases in tumor volume were selected for treatment. Animals were injected sub cutaneously twice per week with 80 mg/kg MN-E6 Fab and an equal number of mice fitting the same selection criteria were injected with vehicle alone (A). Male NOD/SCID mice were implanted with 6 million DU-145 human prostate cancer cells that had been mixed 50/50 with Matrigel. Mice bearing tumors that were at least 150 mm³ and had three successive increases in tumor volume were selected for treatment. Animals were injected sub-cutaneously every 48 hours with 160 mg/kg MN-E6 Fab and an equal number of mice fitting the same selection criteria were injected with vehicle alone (B). Tumors were measured independently by two researchers twice per week and recorded. Statistics were blindly calculated by independent statistician, giving a P value of 0.0001 for each. Anti-MUC1* Fab inhibited breast cancer growth and prostate cancer growth. Treatment had no effect on weight, bone marrow cell type or number.

[0103] FIG. 8 is a graph of an ELISA assay showing differing levels of expression of humanized MN-E6 anti-MUC1* antibody depending on whether the light chain was kappa or lambda and whether the variable portion was fused to a human IgG1 or IgG2.

[0104] FIG. 9 is a graph of an ELISA assay comparing the binding of the parent mouse MN-E6 antibody to the humanized versions of the MN-E6 antibody to a surface presenting the PSMGFR peptide derived from the MUC1* extracellular domain.

[0105] FIG. 10 is a graph of an ELISA assay showing differing levels of expression of humanized MN-C2 anti-MUC1* antibody depending on whether the light chain was kappa or lambda and whether the variable portion was fused to a human IgG1 or IgG2.

[0106] FIG. 11 is a graph of an ELISA assay comparing the binding of the parent mouse MN-C2 antibody to the humanized versions of the MN-C2 antibody to a surface presenting the PSMGFR peptide derived from the MUC1* extracellular domain.

[0107] FIG. 12 is a graph of an ELISA assay showing binding of humanized single chain (scFv) MN-C2 and MN-E6 antibodies binding to a surface presenting the PSMGFR peptide derived from the MUC1* extracellular domain.

[0108] FIG. 13 A-C shows FPLC traces of the purification of MN-E6 scFv-Fc fusion protein that was grown in low IgG FBS over a Protein A affinity column. A) is the trace of the flow through. B) is the trace of the elution. C) shows the purified protein on a reducing or non-reducing gel.

[0109] FIG. 14 A-B shows photographs of SDS-PAGE characterization of purified MN-E6 scFv-Fc fusion proteins on a non-reducing gels, wherein the Fc portion that was fused to the MN-E6 was either wild type (wt) or mutated as follows: A) F405Q, Y407R, T394D; B) T366W/L368W, T364R/L368R, T366W/L368W or T364R/L368R. Fc mutants F405Q, Y407R, T366W/L368W, T364R/L368R, T366W/L368W and T364R/L368R all favored monomer over dimer formation. The reference construct amino acid sequence for the indicated mutations is SEQ ID NO:273.

[0110] FIG. 15 A-B shows FPLC traces of the purification of MN-E6 scFv-Fc Y407Q fusion protein that was grown in low IgG FBS over a Protein A affinity column. A) is the trace of the flow through. B) is the trace of the elution. The protein was further purified by size exclusion over an S200 column (C). (D) is a photograph of an SDS-PAGE gel showing which fractions had a predominance of monomer. The reference construct amino acid sequence for the indicated mutations is SEQ ID NO:273.

[0111] FIG. 16 shows a photograph of SDS-PAGE characterization of purified MN-E6 scFv-Fc-mutant fusion proteins on a non-reducing gel, wherein the Fc portion that was fused to the MN-E6 scFv was either wild type (wt) or mutated by elimination of the hinge region, ‘DHinge’, of the Fc or elimination of the hinge region of the Fc and also bearing the Y407R mutation. All the Fc mutants favored monomer over dimer formation. The reference construct amino acid sequence for the indicated mutations is SEQ ID NO:273.

[0112] FIGS. 17 A-C. A and B show photograph of non-reducing SDS-PAGE characterization of large scale expression and purification of MN-E6 scFv-Fc hingeless mutant, showing that it is a monomer. FPLC characterization and purification of MN-E6 scFv-Fc hingeless mutant is shown (C).

[0113] FIG. 18 A-C shows photographs of the SDS-PAGE characterization of the purified MN-C3 scFv-Fc fusion protein on a non-reducing gel (A) or a reducing gel (B). The protein was purified by size exclusion. The FPLC trace is shown (C).

[0114] FIG. 19 A-B shows photographs of Native gels of MN-C3 or MN-E6 Fabs, scFv, scFv-Fc, wherein the Fc portion is wild type or mutants that prefer or are exclusively monomers. Native gels show that the Y407R Fc mutation (A) and the double mutant Y407R and a deleted hinge (B) favor monomer over dimer the best. Note that proteins are loaded onto a gel at much higher concentrations than typical use concentrations. The dimer formation of other Fc mutants may only reflect the fact that loading concentration is very high.

[0115] FIG. 20 shows a graph of an ELISA wherein the surface was immobilized with either PSMGFR peptide, PSMGFR minus 10 amino acids from the N-terminus or minus 10 amino acids from the C-terminus. The hu MN-E6 scFv-Fc bound to the PSMGFR peptide and to the PSMGFR N-10 peptide but not to the PSMGFR C-10 peptide. The parent MN-E6 antibody and the humanized MN-E6 require the C-terminal 10 amino acids of PSMGFR for binding.

[0116] FIG. 21 A-B shows an ELISA graph of several anti-MUC1* scFv-Fc fusion proteins wherein the Fc region has been eliminated or mutated. Shown are hu MN-E6 scFv-Fc-wt, hu MN-E6 scFv-Fc-Y407R, hu MN-E6 scFv-Fc-hingeless, and hu MN-E6 scFv-Fc-Y407R-hingeless. All mutants bind to the PSMGFR peptide of the MUC1* extracellular domain (A). An ELISA graph of several anti-MUC1* scFv-Fc fusion proteins wherein the Fc region is either wild type or mutated. Shown are hu MN-E6 scFv-Fc-wt, hu MN-E6 scFv-Fc-hingeless, and hu MN-C3 scFv-Fc is shown (B). All bind to the PSMGFR peptide of the MUC1* extracellular domain.

[0117] FIG. 22 A-C shows graphs of ELISAs wherein the assay plate surface was immobilized with either PSMGFR peptide, PSMGFR minus 10 amino acids from the N-terminus or minus 10 amino acids from the C-terminus. The MN-C3 antibody variants were then assayed for binding to the various MUC1* peptides. A) Purified mouse monoclonal MN-C3 antibody; B) Impure humanized MN-C3 antibody; and C) the humanized MN-C3 scFv-Fc. ELISAs show binding to the PSMGFR peptide as well as to certain deletion peptides.

[0118] FIG. 23 shows a graph of an ELISA assay that quantifies the binding of humanized MN-E6 scFv-Fc-delta hinge, aka Dhinge or hingeless, and humanized MN-E6 scFv to the MUC1* peptide PSMGFR.

[0119] FIG. 24 shows photographs of immunofluorescence experiments in which humanized MN-C2 scFv or MN-E6 scFv specifically binds to MUC1* positive breast cancer cells in an identical concentration dependent manner. A-G: hu MN-C2 scFv binding to T47D breast cancer cells at concentrations indicated. H-N shows the fluorescently labeled scFv and DAPI. O-U: hu MN-E6 scFv binding to T47D breast cancer cells at concentrations indicated. V-B′ shows the fluorescently labeled scFv and DAPI. C′ is the secondary antibody control.

[0120] FIG. 25 A-L shows photographs of 1500 MUC1* positive breast cancer cells that have been cultured in normal medium or in the presence of humanized MN-E6 scFv. A-D are bright field images taken at 4× magnification. E-H are calcein fluorescent images taken at 4× magnification. I-L are calcein fluorescent images taken at 10× magnification. A,E, I show control cells cultured in normal RPMI medium. B,F, J show control cells cultured in normal RPMI medium plus a volume of PBS equal to the volume of MN-E6 scFv in PBS that is added to experimental wells. C, G, K show cells cultured in normal RPMI medium plus 500 ug/mL MN-E6 scFv. D, H, L show cells cultured in normal RPMI medium plus 5 ug/mL MN-E6 scFv. The photographs show killing and/or growth inhibition of MUC1* positive cells by MN-E6 scFv at 5 ug/mL and an even greater effect at 500 ug/mL. Images were taken at 96 hours post addition of test molecule.

[0121] FIG. 26 A-L shows photographs of 1500 MUC1* positive breast cancer cells that have been cultured in normal medium or in the presence of humanized MN-E6 scFv-Fc Dhinge, which is a hingeless or delta hinge mutant. A-F are bright field images taken at 20× magnification. G-L are calcein fluorescent images taken at 4× magnification. A, G show control cells cultured in normal RPMI medium. B, H show cells cultured in normal RPMI medium plus 100 ug/mL hMN-E6 scFv-Fc Dhinge. C, I show cells cultured in normal RPMI medium plus 50 ug/mL hMN-E6 scFv-Fc Dhinge. D, J show cells cultured in normal RPMI medium plus 5 ug/mL hMN-E6 scFv-Fc Dhinge. E, K show cells cultured in normal RPMI medium plus 0.5 ug/mL hMN-E6 scFv-Fc Dhinge. F, L show cells cultured in normal RPMI medium plus 500 ug/mL of MN-E6 Fab. The photographs show killing and/or growth inhibition of MUC1* positive cells by hMN-E6 scFv-Fc Dhinge 5 ug/mL, an even greater effect at 50 ug/mL and yet an even greater effect at 100 ug/mL. Comparing cell morphology to the control cells, cancer cells grown in MN-E6 Fab or in an effective amount of hMN-E6 scFv-Fc Dhinge, show rounding up of the cells which morphology change occurs before cell death. Images were taken at 96 hours post addition of test molecule.

[0122] FIG. 27 shows a graph of the image analysis of the fluorescent images of FIGS. 25 and 26. Image J was used to quantify the number of cells remaining after 96 hours treatment in humanized MN-E6scFv or MN-E6 scFv-Fc-delta hinge, aka Dhinge. The analysis software uses pixel counting and pixel fluorescence intensity to quantify the number of cells in each photograph. Analysis was performed over the entire image 512×512 pixels, 8-bit image. For comparison, the inhibition of mouse monoclonal MN-E6 Fab is also analyzed.

[0123] FIG. 28 A-C show schematics of CAR sequence components.

[0124] FIG. 29 is a graph of an experiment measuring IL-2 cytokine secretion by Jurkat T cells that were transduced with a panel of CARs, including MN-E6-CD8-3z, MN-E6-CD8-CD28-3z, MN-E6-CD8-41BB-3z, MN-E6-CD4-CD28-3z and MN-E6-CD4-CD28-41BB-3z, when the CAR T cells were exposed to K562-wt cells or K562 cells that had been transfected with MUC1*.

[0125] FIG. 30 is a graph of an experiment measuring IL-2 cytokine secretion by Jurkat T cells that were transduced with a panel of CARs, including MN-E6-CD8-CD28-3z, MN-E6-CD8-41BB-3z, MN-E6-CD4-CD28-3z and MN-E6-CD4-41BB-3z, when the CAR T cells were exposed to K562-wt cells or K562 cells that had been transfected with MUC1*.

[0126] FIG. 31 is a graph of an experiment measuring IL-2 cytokine secretion by primary human T cells, isolated from a blood sample, that were transduced with a panel of CARs, including MN-E6-CD8-CD28-3z, MN-E6-CD8-41BB-3z and MN-E6-CD4-41BB-3z, when the CAR T cells were exposed to K562-wt cells or K562 cells that had been transfected with MUC1*.

[0127] FIG. 32 is a graph of an experiment measuring interferon-gamma (IFN-g) cytokine secretion by primary human T cells, isolated from a blood sample, that were transduced with a panel of CARs, including MN-E6-CD8-CD28-3z and MN-E6-CD4-41BB-3z, when the CAR T cells were exposed to K562-wt cells or K562 cells that had been transfected with MUC1*.

[0128] FIG. 33 is a graph of an experiment measuring interferon-gamma (IFN-g) cytokine secretion by primary human T cells, isolated from a blood sample, that were transduced with a panel of CARs, including MN-E6-CD8-CD28-3z, MN-E6-CD8-41BB-3z and MN-E6-CD8-CD28-41BB-3z, when the CAR T cells were exposed to K562-wt cells, K562 cells that had been transfected with MUC1*, or MUC1* positive cancer cells of prostate cancer, breast cancer or pancreatic cancer.

[0129] FIG. 34 is a graph of an experiment measuring target cell death when primary human T cells, isolated from a blood sample, that were transduced with a panel of CARs, including MN-E6-CD8-CD28-3z, MN-E6-CD8-41BB-3z and MN-E6-CD4-41BB-3z, when the CAR T cells were exposed to K562-wt cells or K562 cells that had been transfected with MUC1*. The ratio of T cells to target cells was 1:1 and the cells were co-cultured for 24 hours.

[0130] FIG. 35 A-B is a graph of FACS measuring a time course of target cell survival from Day 1 to Day 3. Primary human T cells, isolated from a blood sample, were transduced with a panel of CARs, including humanized MN-E6-CD8-3z, MN-E6-CD8-CD28-3z, MN-E6-CD8-41BB-3z and MN-E6-CD8-CD28-41BB-3z. The CAR T cells were then exposed to K562-wt cells that naturally express low levels of MUC1*, or K562 cells that had been transfected with MUC1* high. The ratio of MUC1* targeting CAR T cells to target cells was either 1:1, 10:1, or 20:1. Surviving cells were detected and measured at Day 1 (A) or Day 3 (B).

[0131] FIG. 36 is a graph of FACS measurements of target cell survival at Day 3 of co-culture experiment. Primary human T cells were transduced with a panel of CARs, including humanized MN-E6-CD8-3z, MN-E6-CD8-CD28-3z, MN-E6-CD8-41BB-3z and MN-E6-CD8-CD28-41BB-3z. The CAR T cells were then exposed to MUC1* positive T47D breast cancer cells or MUC1* positive 1500 aka ZR-75-1 breast cancer cells. The ratio of MUC1* targeting CAR T cells to target cells was either 1:1 or 10:1. As can be seen from the graph, T cells transduced with a MUC1* targeting CAR have a much greater killing effect on MUC1* cancer cells than the untransduced control T cells. In addition, the killing effect is much greater when the ratio of T cells: target cells is increased.

[0132] FIG. 37 is a graph of FACS measurements of target cell survival at Day 1 of co-culture experiment. Primary human T cells were transduced with a panel of CARs, including humanized MN-E6-CD8-41BB-3z, MN-E6-CD4-41BB-3z, and MN-E6-CD8-CD28-41BB-3z. The CAR T cells were then exposed to the following MUC1* positive cancer cells: T47D breast cancer; capan2 pancreatic cancer; or DU-145 prostate cancer. The ratio of MUC1* targeting CAR T cells to target cells was 5:1. As can be seen from the graph, T cells transduced with a MUC1* targeting CAR have a much greater killing effect on MUC1* cancer cells than the untransduced control T cells. Note that the measurements were taken after 24 hours with only a 5:1 T cell to target cell ratio. Also note that MUC1* targeting CARs that have a CD4 extracellular domain-transmembrane-cytoplasmic tail work equally well as CD8 constructs.

[0133] FIG. 38 is a graph of FACS measurements of target cell survival at Day 3 of co-culture experiment. Primary human T cells were transduced with a panel of CARs, including humanized MN-E6-CD8-41BB-3z, MN-E6-CD4-41BB-3z, and MN-E6-CD8-CD28-41BB-3z. The CAR T cells were then exposed to the following MUC1* positive cancer cells: K562 leukemia cells transfected with MUC1*; T47D breast cancer; 1500 aka ZR-75-1 breast cancer cells; or CAPAN-2 pancreatic cancer cells. In addition to the untransduced T cell controls, the assay was performed on PC3 MUC1* negative prostate cancer cells. The ratio of MUC1* targeting CAR T cells to target cells was 1:1. As can be seen from the graph, T cells transduced with a MUC1* targeting CAR have a much greater killing effect on MUC1* cancer cells than the untransduced control T cells. In addition, the killing effect is specific for MUC1* positive cells. Note that MUC1* targeting CARs that have a CD4 extracellular domain-transmembrane-cytoplasmic tail work equally well as CD8 constructs.

[0134] FIG. 39 is a graph of FACS measurements of CAR T cell expansion over 24 hours in co-culture with target cells at a ratio of 5:1 CAR T cells to target cells. The primary human T cells were transduced with a panel of CARs, including humanized MN-E6-CD8-41BB-3z, MN-E6-CD4-41BB-3z, and MN-E6-CD8-CD28-41BB-3z. The CAR T cells were co-cultured with MUC1* positive T47D breast cancer cells, MUC1* positive Capan pancreatic cancer cells, and MUC1-negative cells HCT-116 colon cancer cells and HEK-293 human embryonic kidney cells. As can be seen from the graph, the CAR T population is increased in the presence of MUC1* positive cells.

[0135] FIG. 40 shows a photograph of a Western blot of MUC1* targeting CARs. From 1 to 9 are:

1. E6scFv-Fc-8-41BB-CD3z (Human Fc as hinge region with CD8 TM);
2: E6scFv-FcH-8-41BB-CD3z (Human Fc hingeless as hinge region with CD8 TM)
3: E6scFv-Fc-4-41BB-CD3z (Human Fc as hinge region with CD4 TM)
4: E6scFv-FcH-4-41BB-CD3z (Human Fc as hingeless hinge region with CD4 TM)
5: E6scFv-IgD-8-41BB-CD3z (hinge region from human IgD with CD8 TM)
6: E6scFv-IgD-4-41BB-CD3z (hinge region from human IgD with CD4 TM)
7: E6scFv-X4-8-41BB-CD3z (Long flexible linker as hinge region with CD8 TM)
8: E6scFv-X4-4-41BB-CD3z (Long flexible linker as hinge region with CD4 TM)
9: E6scFv-8-4-41BB-CD3z (Hinge region from CD8 and CD4 a with CD4 TM).

[0136] FIG. 41 shows graphs of FACS scans of T47D breast cancer cells co-cultured with human T cells that were transduced with MN-E6scFv-Fc-8-41BB-CD3z, MN-E6scFv-FcH-8-41BB-CD3z, MN-E6scFv-Fc-4-41BB-CD3z, MN-E6scFv-IgD-8-41BB-CD3z, MN-E6scFv-X4-8-41BB-CD3z and MN-E6scFv-X4-4-41BB-CD3z. T cells and cancer cells were co-cultured at a 1:1 ratio for 48 hours. T cell counts were normalized to an average of all untransduced T cells and target cells were normalized to each specific cell type when co-cultured with untransduced T cells. The graph shows that when the CAR T cells are co-cultured with MUC1* positive cancer cells, the T cell population expands and the targeted cancer cell population decreases.

[0137] FIG. 42 shows graphs of FACS scans of T47D breast cancer cells, Capan-2 pancreatic cancer cells, K562-MUC1* transfected cells, and K562-wt cells that were co-cultured with human T cells that were transduced with MN-E6scFv-Fc-8-41BB-CD3z, MN-E6scFv-FcH-8-41BB-CD3z, MN-E6scFv-Fc-4-41BB-CD3z, MN-E6scFv-IgD-8-41BB-CD3z, MN-E6scFv-X4-8-41BB-CD3z and MN-E6scFv-X4-4-41BB-CD3z. T cells and cancer cells were co-cultured at a 1:1 ratio for 48 hours. T cell counts were normalized to an average of all untransduced T cells and target cells were normalized to each specific cell type when co-cultured with untransduced T cells. The graph shows that when the CAR T cells are co-cultured with MUC1* positive cancer cells, the T cell population expands and the targeted cancer cell population decreases.

[0138] FIG. 43 A,B are photographs of breast cancer tissue arrays. A) was stained with VU4H5 which recognizes MUC1-FL (full length); B) was stained with mouse monoclonal antibody MN-C2 which recognizes cancerous MUC1*. Following automated staining (Clarient Diagnostics), the tissue staining was scored using Allred scoring method which combines an intensity score and a distribution score. C,D,E,F are color coded graphs showing the score calculated for MUC1 full-length staining for each patient's tissue. G,H,I,J are color coded graphs showing the score calculated for MUC1* staining for each patient's tissue.

[0139] FIG. 44 A,B are photographs of breast cancer tissue arrays. A) was stained with VU4H5 which recognizes MUC1-FL (full length); B) was stained with mouse monoclonal antibody MN-C2 which recognizes cancerous MUC1*. Following automated staining (Clarient Diagnostics), the tissue staining was scored using Allred scoring method which combines an intensity score and a distribution score. C,D,E,F are color coded graphs showing the score calculated for MUC1 full-length staining for each patient's tissue. G,H,I,J are color coded graphs showing the score calculated for MUC1* staining for each patient's tissue.

[0140] FIG. 45 shows photographs of normal breast and breast cancer tissues stained with humanized MN-E6-scFv-Fc biotinylated anti-MUC1* antibody at 2.5 ug/mL, then stained with a secondary streptavidin HRP antibody. A) is a normal breast tissue. B-D are breast cancer tissues from patients as denoted in the figure. E-H are photographs of the corresponding serial sections that were stained with the secondary antibody alone.

[0141] FIG. 46 shows photographs of normal breast and breast cancer tissues stained with humanized MN-E6-scFv-Fc biotinylated anti-MUC1* antibody at 2.5 ug/mL, then stained with a secondary streptavidin HRP antibody. A) is a normal breast tissue. B-C are breast cancer tissues from patients as denoted in the figure. D-F are photographs of the corresponding serial sections that were stained with the secondary antibody alone.

[0142] FIG. 47 shows photographs of breast cancer tissues stained with MN-E6 anti-MUC1* antibody at 10 ug/mL, then stained with a rabbit anti mouse secondary HRP antibody. A-D are breast cancer tissues from patient #300. E-H are breast cancer tissues from metastatic patient #291.

[0143] FIG. 48 shows photographs of normal lung and lung cancer tissues stained with humanized MN-E6-scFv-Fc biotinylated anti-MUC1* antibody at 2.5 ug/mL, then stained with a secondary streptavidin HRP antibody. A) is a normal lung tissue. B,C are lung cancer tissues from patients as denoted in the figure. D-F are photographs of the corresponding serial sections that were stained with the secondary antibody alone.

[0144] FIG. 49 shows photographs of normal lung and lung cancer tissues stained with humanized MN-E6-scFv-Fc biotinylated anti-MUC1* antibody at 2.5 ug/mL, then stained with a secondary streptavidin HRP antibody. A) is a normal lung tissue. B,C are lung cancer tissues from patients as denoted in the figure. D-F are photographs of the corresponding serial sections that were stained with the secondary antibody alone.

[0145] FIG. 50 shows photographs of normal lung and lung cancer tissues stained with humanized MN-E6-scFv-Fc biotinylated anti-MUC1* antibody at 25 ug/mL, then stained with a secondary streptavidin HRP antibody. A) is a normal lung tissue. B,C are lung cancer tissues from patients as denoted in the figure. D-F are photographs of the corresponding serial sections that were stained with the secondary antibody alone.

[0146] FIG. 51 shows photographs of normal lung and lung cancer tissues stained with humanized MN-E6-scFv-Fc biotinylated anti-MUC1* antibody at 25 ug/mL, then stained with a secondary streptavidin HRP antibody. A) is a normal lung tissue. B,C are lung cancer tissues from patients as denoted in the figure. D-F are photographs of the corresponding serial sections that were stained with the secondary antibody alone.

[0147] FIG. 52 shows photographs of normal small intestine and cancerous small intestine tissues stained with humanized MN-E6-scFv-Fc biotinylated anti-MUC1* antibody at 5 ug/mL, then stained with a secondary streptavidin HRP antibody. A) is a normal small intestine tissue. B) is small intestine cancer from patient as denoted in the figure. C,D are photographs of the corresponding serial sections that were stained with the secondary antibody alone.

[0148] FIG. 53 shows photographs of normal small intestine tissues stained with humanized MN-E6-scFv-Fc anti-MUC1* antibody at 50 ug/mL, then stained with a secondary goat-anti-human HRP antibody. A-D are normal small intestine tissue. E-H are photographs of the corresponding serial sections that were stained with the secondary antibody alone.

[0149] FIG. 54 shows photographs of cancerous small intestine tissues stained with humanized MN-E6-scFv-Fc anti-MUC1* antibody at 50 ug/mL, then stained with a secondary goat-anti-human HRP antibody. A-D are cancerous small intestine tissue from a patient as denoted in figure. E-H are photographs of the corresponding serial sections that were stained with the secondary antibody alone.

[0150] FIG. 55 shows photographs of cancerous small intestine tissues stained with humanized MN-E6-scFv-Fc anti-MUC1* antibody at 50 ug/mL, then stained with a secondary goat-anti-human HRP antibody. A-D are cancerous small intestine tissue from a patient as denoted in figure. E-H are photographs of the corresponding serial sections that were stained with the secondary antibody alone.

[0151] FIG. 56 shows photographs of normal colon tissues stained with humanized MN-E6-scFv-Fc anti-MUC1* antibody at 50 ug/mL, then stained with a secondary goat-anti-human HRP antibody. A-D are normal colon. E-H are photographs of the corresponding serial sections that were stained with the secondary antibody alone.

[0152] FIG. 57 shows photographs of colon cancer tissues stained with humanized MN-E6-scFv-Fc anti-MUC1* antibody at 50 ug/mL, then stained with a secondary goat-anti-human HRP antibody. A-D are colon cancer tissue from a metastatic patient as denoted in figure. E-H are photographs of the corresponding serial sections that were stained with the secondary antibody alone.

[0153] FIG. 58 shows photographs of colon cancer tissues stained with humanized MN-E6-scFv-Fc anti-MUC1* antibody at 50 ug/mL, then stained with a secondary goat-anti-human HRP antibody. A-D are colon cancer tissue from a Grade 2 patient as denoted in figure. E-H are photographs of the corresponding serial sections that were stained with the secondary antibody alone.

[0154] FIG. 59 shows photographs of colon cancer tissues stained with humanized MN-E6-scFv-Fc anti-MUC1* antibody at 50 ug/mL, then stained with a secondary goat-anti-human HRP antibody. A-D are colon cancer tissue from a metastatic patient as denoted in figure. E-H are photographs of the corresponding serial sections that were stained with the secondary antibody alone.

[0155] FIG. 60 shows photographs of prostate cancer tissues stained with humanized MN-E6-scFv-Fc anti-MUC1* antibody at 50 ug/mL, then stained with a secondary goat-anti-human HRP antibody. A-D are prostate cancer tissue from a patient as denoted in figure. E-H are photographs of the corresponding serial sections that were stained with the secondary antibody alone.

[0156] FIG. 61 shows photographs of prostate cancer tissues stained with humanized MN-E6-scFv-Fc anti-MUC1* antibody at 50 ug/mL, then stained with a secondary goat-anti-human HRP antibody. A-D are prostate cancer tissue from a patient as denoted in figure. E-H are photographs of the corresponding serial sections that were stained with the secondary antibody alone.

[0157] FIG. 62 shows photographs of prostate cancer tissues stained with humanized MN-E6-scFv-Fc anti-MUC1* antibody at 50 ug/mL, then stained with a secondary goat-anti-human HRP antibody. A-D are prostate cancer tissue from a patient as denoted in figure. E-H are photographs of the corresponding serial sections that were stained with the secondary antibody alone.

### DETAILED DESCRIPTION OF THE PREFERRED EMBODIMENTS

[0158] In the present application, “a” and “an” are used to refer to both single and a plurality of objects.

[0159] As used herein, “h” or “hu” placed before an antibody construct is short-hand for humanized.

[0160] As used herein, the term “antibody-like” means a molecule that may be engineered such that it contains portions of antibodies but is not an antibody that would naturally occur in nature. Examples include but are not limited to CAR (chimeric antigen receptor) T cell technology and the Ylanthia® technology. The CAR technology uses an antibody epitope fused to a portion of a T cell so that the body's immune system is directed to attack a specific target protein or cell. The Ylanthia® technology consists of an “antibody-like” library that is a collection of synthetic human Fabs that are then screened for binding to peptide epitopes from target proteins. The selected Fab regions can then be engineered into a scaffold or framework so that they resemble antibodies.

[0161] As used herein, the antibodies MN-C2, MN-E6, MN-C3 and MN-C8, may also be referred to as C2, E6, C3 and C8, respectively.

[0162] As used herein, “PSMGFR” is abbreviation for Primary Sequence of the MUC1 Growth Factor Receptor which is identified by SEQ ID NO:2, and thus is not to be confused with a six amino acid sequence. “PSMGFR peptide” or “PSMGFR region” refers to a peptide or region that incorporates the Primary Sequence of the MUC1 Growth Factor Receptor (SEQ ID NO:2).

[0163] As used herein, the “MUC1*” extra cellular domain is defined primarily by the PSMGFR sequence (GTINVHDVETQFNQYKTEAASRYNLTISDVSVSDVPFPFSAQSGA (SEQ ID NO:2)). Because the exact site of MUC1 cleavage depends on the enzyme that clips it, and that the cleavage enzyme varies depending on cell type, tissue type or the time in the evolution of the cell, the exact sequence of the MUC1* extra cellular domain may vary at the N-terminus.

[0164] Other clipped amino acid sequences may include SNIKFRPGSVVVQLTLAFREGTINVHDVETQFNQYKTEAASRY (SEQ ID NO:620); or SVVVQLTLAFREGTINVHDVETQFNQYKTEAASRY (SEQ ID NO:621).

[0165] As used herein, the term “PSMGFR” is an acronym for Primary Sequence of MUC1 Growth Factor Receptor as set forth as GTINVHDVETQFNQYKTEAASRYNLTISDVSVSDVPFPFSAQSGA (SEQ ID NO:2). In this regard, the “N-number” as in “N-10 PSMGFR”, “N-15 PSMGFR”, or “N-20 PSMGFR” refers to the number of amino acid residues that have been deleted at the N-terminal end of PSMGFR. Likewise “C-number” as in “C-10 PSMGFR”, “C-15 PSMGFR”, or “C-20 PSMGFR” refers to the number of amino acid residues that have been deleted at the C-terminal end of PSMGFR.

[0166] As used herein, the “extracellular domain of MUC1*” refers to the extracellular portion of a MUC1 protein that is devoid of the tandem repeat domain. In most cases, MUC1* is a cleavage product wherein the MUC1* portion consists of a short extracellular domain devoid of tandem repeats, a transmembrane domain and a cytoplasmic tail. The precise location of cleavage of MUC1 is not known perhaps because it appears that it can be cleaved by more than one enzyme. The extracellular domain of MUC1* will include most of the PSMGFR sequence but may have an additional 10-20 N-terminal amino acids.

[0167] As used herein “sequence identity” means homology in sequence of a particular polypeptide or nucleic acid to a reference sequence of nucleic acid or amino acid such that the function of the homologous peptide is the same as the reference peptide or nucleic acid. Such homology can be so close with the reference peptide such that at times the two sequences may be 90%, 95% or 98% identical yet possess the same function in binding or other biological activities.

[0168] MUC1* Antibodies (Anti-PSMGFR) for Treatment or Prevention of Cancers

[0169] We discovered that a cleaved form of the MUC1 (SEQ ID NO:1) transmembrane protein is a growth factor receptor that drives the growth of over 75% of all human cancers. The cleaved form of MUC1, which we called MUC1* (pronounced muk 1 star), is a powerful growth factor receptor. Enzymatic cleavage releases the bulk of the MUC1 extracellular domain. It is the remaining portion comprising a truncated extracellular domain, transmembrane and cytoplasmic tail that is called MUC1*. Cleavage and release of the bulk of the extracellular domain of MUC1 unmasks a binding site for activating ligands dimeric NME1, NME6, NME8, NME7-AB or NME7. Cell growth assays show that it is ligand-induced dimerization of the MUC1* extracellular domain that promotes growth (FIG. 1 A-D). MUC1* positive cells treated with either bivalent ‘by’ anti-MUC1* antibody, monovalent ‘my’ or Fab, NM23-H1 dimers or NME7-AB. Bivalent anti-MUC1* antibodies stimulate growth of cancer cells whereas the monovalent Fab inhibits growth. Classic bell-shaped curve indicates ligand induced dimerization stimulates growth. Dimeric NM23-H1, aka NME1, stimulates growth of MUC1* positive cancer cells but siRNA to suppress MUC1 expression eliminate its effect (C). NME7-AB also stimulates the growth of MUC1* positive cells (D).

[0170] MUC1* is an ideal target for cancer drugs as it is aberrantly expressed on over 75% of all cancers and is likely overexpressed on an even higher percentage of metastatic cancers (Fessler S P, Wotkowicz M T, Mahanta S K and Bamdad C. (2009). MUC1* is a determinant of trastuzumab (Herceptin) resistance in breast cancer cells. Breast Cancer Res Treat. 118(1):113-124). After MUC1 cleavage most of its extracellular domain is shed from the cell surface. The remaining portion has a truncated extracellular domain that at least comprises the primary growth factor receptor sequence, PSMGFR (SEQ ID NO:2). Antibodies that bind to the PSMGFR sequence and especially those that competitively inhibit the binding of activating ligands such as NME proteins, including NME1, NME6, NME8 and NME7, are ideal therapeutics and can be used to treat or prevent MUC1 positive or MUC1* positive cancers, as stand-alone antibodies, antibody fragments or variable region fragments thereof incorporated into bispecific antibodies, or chimeric antigen receptors also called CARs. Therapeutics anti-MUC1* antibodies can be monoclonal, polyclonal, antibody mimics, engineered antibody-like molecules, full antibodies or antibody fragments. Examples of antibody fragments include but are not limited to Fabs, scFv, and scFv-Fc. Human or humanized antibodies are preferred for use in the treatment or prevention of cancers. In any of these antibody-like molecules, mutations can be introduced to prevent or minimize dimer formation. Anti-MUC1* antibodies that are monovalent or bispecific are preferred because MUC1* function is activated by ligand induced dimerization. Typical binding assays show that NME1 and NME7 bind to the PSMGFR peptide portion of MUC1* (FIG. 2 A, D). Further, they show that these activating growth factors bind to the membrane proximal portion of MUC1*, as they do not bind to the PSMGFR peptide if the 10 C-terminal amino acids are missing. Similarly, anti-MUC1* antibodies MN-C2 and MN-E6 bind to the PSMGFR peptide if an only if the 10 C-terminal amino acids are present (FIG. 2 B, C). Antibodies MN-C3 and MN-C8 bind to epitopes that are different from MN-C2 and MN-E6, as they do not depend on the presence of the 10 C-terminal amino acids of the PSMGFR peptide (FIG. 2 E, F). Antibodies MN-C2, MN-E6, MN-C3 or MN-C8, or fragments derived from them, as stand-alone antibodies or incorporated into bispecific antibodies, BiTEs or chimeric antigen receptors also called CARs expressed by immune cells are all potent anti-cancer therapeutics.

[0171] Therapeutic anti-MUC1* antibodies for use as a stand alone antibody therapeutic or for integration into a BiTE or a CAR can be selected based on specific criteria. The parent antibody can be generated using typical methods for generating monoclonal antibodies in animals. Alternatively, they can be selected by screening antibody and antibody fragment libraries for their ability to bind to a MUC1* peptide, which can be the PSMGFR peptide (SEQ ID NO:2), SNIKFRPGSVVVQLTLAFREGTINVHDVETQFNQYKTEAASRY (SEQ ID NO:620); or SVVVQLTLAFREGTINVHDVETQFNQYKTEAASRY (SEQ ID NO:621).

[0172] Resultant antibodies or antibody fragments generated or selected in this way can then be further selected by passing additional screens. For example, antibodies or antibody fragments become more preferred based on their ability to bind to MUC1* positive cancer cells or tissues but not to MUC1 negative cancer cells or tissues. Further, anti-MUC1* antibodies or antibody fragments may be de-selected as anti-cancer therapeutics if they bind to stem or progenitor cells. Anti-MUC1* antibodies or antibody fragments become more preferred if they have the ability to competitively inhibit the binding of activating ligands to MUC1*. FIG. 3 A-C shows that MN-E6 and MN-C2 competitively inhibit the binding of activating ligands NME1 and NME7 to MUC1*. A process for selecting anti-MUC1* antibodies for use in treating a patient diagnosed with a MUC1 positive cancer, at risk of developing a MUC1 positive cancer or suspected of having a MUC1 positive cancer comprises one or more of the following steps of selecting antibodies or antibody fragments that 1) bind to the PSMGFR peptide; 2) bind to the N-10 PSMGFR peptide; 3) bind to cancer cells; 4) do not bind to stem or progenitor cells; and 5) competitively inhibited the binding of dimeric NME1 or NME7-AB to the PSMGFR peptide. For example, FIG. 3 A-C show that monoclonals MN-E6 and MN-C2 satisfy all five criteria, while monoclonals MN-C3 and MN-C8 do not competitively inhibit the binding of activating ligands NME1 and NME7 (Figure M3 C). However, antibodies or antibody fragments derived from MN-C3 and MN-C8 are equally potent as anti-cancer agents when integrated into a BiTE or a CAR as in these methods, the killing effect of the immune cells is more important than the ability to inhibit the binding of activating ligands. In addition, toxic agents conjugated to MN-E6, MN-C2, MN-C3 or MN-C8 are potent anti-cancer therapeutics. Recall that the MUC1* growth factor receptor is activated by ligand-induced dimerization of its extracellular domain. Therefore the ideal antibody therapeutic should not dimerize the MUC1* extracellular domain. Preferably, suitable antibodies in this regard include monovalent antibodies such as those generated in lamas and camels, Fabs, scFv's, single domain antibodies (sdAb), scFv-Fc as long as the Fc portion is constructed such that it does not homo-dimerize.

[0173] FACS scans show that anti-MUC1* antibodies MN-C2, MN-E6, MN-C3 and MN-C8 specifically bind to MUC1* positive cancer cells and MUC1* transfected cells but not MUC1* or MUC1 negative cells. In one example, a humanized MN-C2 scFv is shown to bind to ZR-75-1, aka 1500, MUC1* positive breast cancer cells (FIG. 4 A-C). MN-E6 was shown to bind to MUC1 negative HCT-116 colon cancer cells if an only if they were transfected with MUC1*. MN-E6 also bound to MUC1* positive cancer cells such as ZR-75-1, aka 1500, MUC1* positive breast cancer cells (FIG. 4 D-F). Binding assays such as ELISAs, immunofluorescence, and the like all confirm that MN-C2 and MN-E6 bind to the PSMGFR peptide and to live MUC1 positive cancer cells. Humanized anti-MUC1* antibodies are selected based on their ability to also bind to the PSMGFR peptide or to MUC1 positive cancer cells. FIG. 5 shows that humanized MN-C2 scFv binds with high affinity to the MUC1* peptide PSMGFR with an EC-50 of about 333 nM. Humanized MN-C2 scFv, like Fabs, potently inhibits the growth of MUC1* positive cancer cells as is shown in one example in FIG. 6 A, B.

[0174] The Fabs of MN-E6 and MN-C2 or the comparable single chain variable regions derived from them potently inhibit the growth of MUC1* positive cancers in vitro and in vivo. In several examples, the Fabs of Anti-MUC1* antibodies inhibited the growth of human MUC1* positive cancers in vivo. In one case, immune-compromised mice were implanted with human breast tumors then treated with MN-E6 Fab after tumor engraftment. FIG. 7A shows that MN-E6 Fab potently inhibited the growth of MUC1* positive breast cancers. Female nu/nu mice implanted with 90-day estrogen pellets were implanted with 6 million T47D human breast cancer cells that had been mixed 50/50 with Matrigel. Mice bearing tumors that were at least 150 mm̂3 and had three successive increases in tumor volume were selected for treatment. Animals were injected sub cutaneously twice per week with 80 mg/kg MN-E6 Fab and an equal number of mice fitting the same selection criteria were injected with vehicle alone (A). In another aspect, MN_E6 was shown to halt the growth of prostate cancer. FIG. 7B shows that MN-E6 Fab potently inhibited the growth of MUC1* positive prostate cancers. Male NOD/SCID mice were implanted with 6 million DU-145 human prostate cancer cells that had been mixed 50/50 with Matrigel. Mice bearing tumors that were at least 150 mm̂3 and had three successive increases in tumor volume were selected for treatment. Animals were injected sub-cutaneously every 48 hours with 160 mg/kg MN-E6 Fab and an equal number of mice fitting the same selection criteria were injected with vehicle alone (B). Tumors were measured independently by two researchers twice per week and recorded. Statistics were blindly calculated by independent statistician, giving a P value of 0.0001 for each. Anti-MUC1* Fab inhibited breast cancer growth and prostate cancer growth. Treatment had no effect on weight, bone marrow cell type or number. The MN-E6 Fab effectively inhibited the growth of the tumors, while the control group's tumors continued to grow until sacrifice. No adverse effects of treatment were observed or detected.

[0175] A recombinant MN-E6 was constructed that like the Fab is monomeric. In this case, MN-E6 was humanized. There are a number of methods known to those skilled in the art for humanizing antibodies. In addition to humanizing, libraries of human antibodies can be screened to identify other fully human antibodies that bind to the PSMGFR. A single chain of the humanized MN-E6 variable region, called an scFv, was genetically engineered such that it was connected to the Fc portion of the antibody (SEQ ID NO:256 and 257). Fc regions impart certain benefits to antibody fragments for use as therapeutics. The Fc portion of an antibody recruits complement, which in general means it can recruit other aspects of the immune system and thus amplify the anti-tumor response beyond just inhibiting the target. The addition of the Fc portion also increases the half-life of the antibody fragment (Czajkowsky D M, Hu J, Shao Z and Pleass R J. (2012) Fc-fusion proteins: new developments and future perspectives. EMBO Mol Med. 4(10):1015-1028). However, the Fc portion of an antibody homo-dimerizes, which in the case of anti-MUC1* antibody based therapeutics is not optimal since ligand-induced dimerization of the MUC1* receptor stimulates growth. As can be seen in FIG. 13 B, humanized MN-E6 scFv-Fc is a dimer, in part due to disulfide bonding. Therefore, mutations in the Fc region that resist dimer formation are preferred for anti-MUC1* anti-cancer therapeutics. Deletion of the hinge region (hingeless also called delta hinge or Dhinge in some figures and examples SEQ ID NO: 288 and 289) and other mutations in the Fc region that make the Fc-mutant resistant to dimerization were made. The following mutations were made in the CH3 domain to create a monomeric scFv-Fc fusion protein: Y407R (SEQ ID NO: 278 and 279), F405Q (SEQ ID NO: 280 and 281), T394D (SEQ ID NO: 282 and 283), T366W/L368W (SEQ ID NO: 284 and 285), T364R/L368R (SE ID NO: 286 and 287). FIG. 14 shows photographs of SDS-PAGE characterization of purified MN-E6 scFv-Fc fusion proteins on a non-reducing gels, wherein the Fc portion that was fused to the MN-E6 was either wild type (wt) or mutated as follows: A) F405Q, Y407R, T394D; B) T366W/L368W, T364R/L368R, T366W/L368W or T364R/L368R. Fc mutants F405Q, Y407R, T366W/L368W, T364R/L368R, T366W/L368W and T364R/L368R all favored monomer over dimer formation. FIG. 15 shows FPLC traces of the purification of MN-E6 scFv-Fc Y407Q fusion protein that was grown in low IgG FBS over a Protein A affinity column. A) is the trace of the flow through. B) is the trace of the elution. The protein was further purified by size exclusion over an 5200 column (C). (D) is a photograph of an SDS-PAGE gel showing which fractions had a predominance of monomer. FIG. 16 shows a photograph of SDS-PAGE characterization of purified MN-E6 scFv-Fc-mutant fusion proteins on a non-reducing gel, wherein the Fc portion that was fused to the MN-E6 scFv was either wild type (wt) or mutated by elimination of the hinge region, ‘DHinge’, of the Fc or elimination of the hinge region of the Fc and also bearing the Y407R mutation. All the Fc mutants favored monomer over dimer formation. The reference construct amino acid sequence for the indicated mutation is SEQ ID NO:273. Other relevant sequences are SEQ ID NOS:289 and 279. FIGS. 17 A-C. A and B show photograph of non-reducing SDS-PAGE characterization of large scale expression and purification of MN-E6 scFv-Fc hingeless mutant, showing that it is a monomer. FPLC characterization and purification of MN-E6 scFv-Fc hingeless mutant is shown (C). FIG. 18 A-C shows photographs of the SDS-PAGE characterization of the purified MN-C3 scFv-Fc fusion protein on a non-reducing gel (A) or a reducing gel (B). The protein was purified by size exclusion. The FPLC trace is shown (C). FIG. 19 A-B shows photographs of Native gels of MN-C3 or MN-E6 Fabs, scFv, scFv-Fc, wherein the Fc portion is wild type or mutants that prefer or are exclusively monomers. Native gels show that the Y407R Fc mutation (A) and the double mutant Y407R and a deleted hinge (B) favor monomer over dimer the best. Note that proteins are loaded onto a gel at much higher concentrations than typical use concentrations. The dimer formation of other Fc mutants may only reflect the fact that loading concentration is very high.

[0176] Some mutations or deletions were so effective that, even when loaded onto a gel at high concentrations, they resist dimer formation (FIG. 14 A, B). The Y407R mutation results in a nearly pure population of dimeric scFv-Fc (FIG. 10). Similarly deletions of the hinge region of the Fc result in fusion proteins that are monomers rather than dimers. Combinations of mutations can result in even more effective resistance of dimer formation (FIGS. 16 and 17). These and other mutations and combinations thereof were introduced into CH2-CH3 (SEQ ID NO:274 and 275) and CH3 (SEQ ID NO:276 and 277) fusion proteins such as scFv or in the hingeless Fc-fusion proteins such as scFv and were shown to eliminate or minimize dimerization.

[0177] Like the parent mouse monoclonal antibodies, human or humanized antibodies as well as single chain constructs, scFv's, scFv-Fc fusions or scFv-Fc-mutants specifically bind to the synthetic MUC1* peptides (FIGS. 20-22). Figure E23 shows a graph of an ELISA assay that quantifies the binding of humanized MN-E6 scFv-Fc-delta hinge, aka Dhinge or hingeless, and humanized MN-E6 scFv to the MUC1* peptide PSMGFR.

[0178] The human or humanized anti-MUC1* antibody fragments described here specifically bind to MUC1 and MUC1* positive cancer cells. FIG. 24 shows photographs of immunofluorescence experiments in which humanized MN-C2 scFv or MN-E6 scFv specifically binds to MUC1* positive breast cancer cells in an identical concentration dependent manner. A-G: hu MN-C2 scFv binding to T47D breast cancer cells at concentrations indicated. H-N shows the fluorescently labeled scFv and DAPI. O-U: hu MN-E6 scFv binding to T47D breast cancer cells at concentrations indicated. V-B′ shows the fluorescently labeled scFv and DAPI. C′ is the secondary antibody control.

[0179] In addition to binding to MUC1* positive cancer cells, the anti-MUC1* antibody variable region fragments, scFv's, scFv-Fc's and scFv-Fc-mutants inhibited growth of MUC1-positive cancer cells. FIG. 25 A-L shows photographs of MUC1* positive breast cancer cells that have been cultured in normal medium or in the presence of humanized MN-E6 scFv. The photographs show killing and/or growth inhibition of MUC1* positive cells by MN-E6 scFv at 5 ug/mL and an even greater effect at 500 ug/mL. FIG. 26 A-L shows photographs of MUC1* positive breast cancer cells that have been cultured in normal medium or in the presence of humanized MN-E6 scFv-Fc Dhinge, which is a hingeless or delta hinge mutant. The photographs show killing and/or growth inhibition of MUC1* positive cells by hMN-E6 scFv-Fc Dhinge 5 ug/mL, an even greater effect at 50 ug/mL and yet an even greater effect at 100 ug/mL. FIG. 27 shows a graph of the image analysis of the fluorescent images of FIGS. 25 and 26. Image J was used to quantify the number of cells remaining after 96 hours treatment in humanized MN-E6scFv or MN-E6 scFv-Fc-delta hinge, aka Dhinge. The analysis software uses pixel counting and pixel fluorescence intensity to quantify the number of cells in each photograph. Analysis was performed over the entire image 512×512 pixels, 8-bit image. For comparison, the inhibition of mouse monoclonal MN-E6 Fab is also analyzed.

[0180] These data show that a human or humanized MN-E6 antibody or antibody fragment, Fab, MN-E6 scFv or hu MN-E6 scFv-Fcₘᵤₜ are effective anti-cancer agents that can be administered to a person diagnosed with a MUC1 or MUC1* positive cancer, suspected of having a MUC1 or MUC1* positive cancer or is at risk of developing a MUC1 or MUC1* positive cancer.

[0181] In these specific examples, the dimer resistant Fc that was fused onto an antibody fragment or scFv is hu MN-E7 scFv. However, any of these Fc region mutations or combinations thereof that eliminate or minimize dimerization can be fused onto variable region fragments or single chain constructs of MN-E6, MN-C2, MN-C3 or MN-C8 or other antibodies identified that selectively bind to MUC1* as it exists on cancer cells or tissues. In addition, the Fabs of these antibodies can be used as an anti-cancer therapeutic. In one aspect of the invention, a person diagnosed with, suspected of having or is at risk of developing a MUC1* or MUC1 positive cancer is treated with an effective amount of human or humanized MN-E6 scFv, MN-C2 scFv, MN-C3 scFv, or MN-C8 scFv. In another aspect of the invention, a person diagnosed with, suspected of having or is at risk of developing a MUC1* or MUC1 positive cancer is treated with an effective amount of human or humanized MN-E6 scFv-Fc_{Y407R}, MN-C2 scFv-Fc_{Y407R}, MN-C3 scFv-Fc_{Y407R}, or MN-C8 scFv-Fc_{Y407R}. In another aspect of the invention, a person diagnosed with, suspected of having or is at risk of developing a MUC1* or MUC1 positive cancer is treated with an effective amount of human or humanized MN-E6 scFv-Fc mutant_{Dhinge}, MN-C2 scFv-Fc mutant_{Dhinge}, MN-C3 scFv-Fc mutant_{Dhinge}, or MN-C8 scFv-Fc mutant_{Dhinge}. In yet another aspect of the invention, a person diagnosed with, suspected of having or is at risk of developing a MUC1* or MUC1 positive cancer is treated with an effective amount of human or humanized MN-E6 scFv-Fc mutant_{Y407R-Dhinge}, MN-C2 scFv-Fc mutant_{Y407R-Dhinge}, MN-C3 scFv-Fc mutant_{Y407R-Dhinge}, or MN-C8 scFv-Fc mutant_{Y407R-Dhinge}. One aspect of the invention is a method for treating a patient diagnosed with, suspected of having, or at risk of developing a MUC1 positive or MUC1* positive cancer, wherein the patient is administered an effective amount of a monomeric MN-E6 scFv, MN-C2 scFv, MN-C3 scFv, MN-C8 scFv, or MN-E6 scFv-Fc, MN-C2 scFv-Fc, MN-C3 scFv-Fc, MN-C8 scFv-Fc, wherein the Fc portion of the antibody-like protein has been mutated such that it resists dimer formation.

[0182] Humanizing

[0183] Humanized antibodies or antibody fragments or fully human antibodies that bind to the extracellular domain of −MUC1* are preferred for therapeutic use. The techniques described herein for humanizing antibodies are but a few of a variety of methods known to those skilled in the art. The invention is not meant to be limited by the technique used to humanize the antibody.

[0184] Humanization is the process of replacing the non-human regions of a therapeutic antibody (usually mouse monoclonal antibody) by human one without changing its binding specificity and affinity. The main goal of humanization is to reduce immunogenicity of the therapeutic monoclonal antibody when administered to human. Three distinct types of humanization are possible. First, a chimeric antibody is made by replacing the non-human constant region of the antibody by the human constant region. Such antibody will contain the mouse Fab region and will contain about 80-90% of human sequence. Second, a humanized antibody is made by grafting of the mouse CDR regions (responsible of the binding specificity) onto the variable region of a human antibody, replacing the human CDR (CDR-grafting method). Such antibody will contain about 90-95% of human sequence. Third and last, a full human antibody (100% human sequence) can be created by phage display, where a library of human antibodies is screened to select antigen specific human antibody or by immunizing transgenic mice expressing human antibody.

[0185] A general technique for humanizing an antibody is practiced approximately as follows. Monoclonal antibodies are generated in a host animal, typically in mice. Monoclonal antibodies are then screened for affinity and specificity of binding to the target. Once a monoclonal antibody that has the desired effect and desired characteristics is identified, it is sequenced. The sequence of the animal-generated antibody is then aligned with the sequences of many human antibodies in order to find human antibodies with sequences that are the most homologous to the animal antibody. Biochemistry techniques are employed to paste together the human antibody sequences and the animal antibody sequences. Typically, the non-human CDRs are grafted into the human antibodies that have the highest homology to the non-human antibody. This process can generate many candidate humanized antibodies that need to be tested to identify which antibody or antibodies has the desired affinity and specificity.

[0186] Once a human antibody or a humanized antibody has been generated it can be further modified for use as an Fab fragment, as a full antibody, or as an antibody-like entity such as a single chain molecule containing the variable regions, such as scFv or an scFv-Fc. In some cases it is desirable to have Fc region of the antibody or antibody-like molecule mutated such that it does not dimerize.

[0187] In addition to methods that introduce human sequences into antibodies generated in non-human species, fully human antibodies can be obtained by screening human antibody libraries with a peptide fragment of an antigen. A fully human antibody that functions like MN-E6 or MN-C2 is generated by screening a human antibody library with a peptide having the sequence of the PSMGFR N-10 peptide. A fully human antibody that functions like MN-C3 or MN-C8 is generated by screening a human antibody library with a peptide having the sequence of the PSMGFR C-10 peptide.

[0188] Humanized anti-MUC1* antibodies were generated based on the sequences of the mouse monoclonal antibodies MN-E6, MN-C2, MN-C3 and MN-C8. In one aspect of the invention, a patient diagnosed with a MUC1* positive cancer is treated with an effective amount of humanized MN-E6, MN-C2, MN-C3 or MN-C8. In a preferred embodiment, a patient diagnosed with a MUC1* positive cancer is treated with an effective amount of humanized MN-E6 or MN-C2. In another aspect of the invention, a patient diagnosed with a MUC1* positive cancer is treated with an effective amount of humanized monovalent MN-E6, MN-C2, MN-C3 or MN-C8, wherein monovalent means the corresponding Fab fragment, the corresponding scFv or the corresponding scFv-Fc fusion. In a preferred embodiment, a patient diagnosed with a MUC1* positive cancer is treated with an effective amount of a humanized scFv or monomeric humanized scFv-Fc of MN-E6 or MN-C2. Since the MUC1* growth factor receptor is activated by ligand induced dimerization of its extracellular domain, and because the Fc portion of an antibody homo-dimerizes, it is preferable that a construct that includes an Fc portion uses a mutated Fc region that prevents or minimizes dimerization.

[0189] Antibodies that bind to PSMGFR (SEQ ID NO:2) peptide of the extracellular domain of the MUC1* receptor are potent anti-cancer therapeutics that are effective for the treatment or prevention of MUC1* positive cancers. They have been shown to inhibit the binding of activating ligands dimeric NME1 (SEQ ID NOS: 3 and 4) and NME7 (SEQ ID NOS: 5 and 6) to the extracellular domain of MUC1*. Anti-MUC1* antibodies that bind to the PSMGFR sequence inhibit the growth of MUC1*-positive cancer cells, specifically if they inhibit ligand-induced receptor dimerization. Fabs of anti-MUC1* antibodies have been demonstrated to block tumor growth in animals. Thus, antibodies or antibody fragments that bind to the extracellular domain of MUC1* would be beneficial for the treatment of cancers wherein the cancerous tissues express MUC1*.

[0190] Antibodies that bind to PSMGFR region of MUC1* or bind to a synthetic PSMGFR peptide are preferred. We have identified several monoclonal antibodies that bind to the extracellular domain of MUC1*. Among this group are mouse monoclonal antibodies MN-E6, MN-C2, MN-C3 and MN-C8, the variable regions of which were sequenced and are given as for MN-E6 SEQ ID NOS: 12-13 and 65-66, for MN-C2 SEQ ID NOS: 118-119 and 168-169, for MN-C3 SEQ ID NOS: 413-414 and 458-459 and for MN-C8 SEQ ID NOS: 505-506 and 543-554. The CDRs of these antibodies make up the recognition units of the antibodies and are the most important parts of the mouse antibody that should be retained when grafting into a human antibody. The sequences of the CDRs for each mouse monoclonal are as follows, heavy chain sequence followed by light chain: MN-E6 CDR1 (SEQ ID NO:16-17 and 69-70) CDR2 (SEQ ID NO:20-21 and 73-74) CDR3 (SEQ ID NO: 24-25 and 77-78), MN-C2 CDR1 (SEQ ID NO:122-123 and 172-173) CDR2 (SEQ ID NO:126-127 and 176-177) CDR3 (SEQ ID NO:130-131 and 180-181), MN-C3 CDR1 (SEQ ID NO:417-418 and 462-463) CDR2 (SEQ ID NO:421-422 and 466-467) CDR3 (SEQ ID NO:425-426 and 470-471), MN-C8 CDR1 (SEQ ID NO:507-508 and 545-546) CDR2 (SEQ ID NO:509-510 and 547-548) CDR3 (SEQ ID NO:511-512 and 549-550). In some cases, portions of the framework regions that by modeling are thought to be important for the 3-dimensional structure of the CDRs, are also imported from the mouse sequence.

[0191] Monoclonal antibodies MN-E6 and MN-C2 have greater affinity for MUC1* as it appears on cancer cells. Monoclonal antibodies MN-C3 and MN-C8 have greater affinity for MUC1* as it appears on stem cells. By sequence alignment the following human antibodies were chosen as being sufficiently homologous to the mouse antibody that substitution of the mouse CDRs would result in an antibody that retained ability to recognize the target. Mouse MN-E6 heavy chain variable region was homologous to human IGHV3-21*03 heavy chain variable region (SEQ ID NO: 26-27) and the light chain variable region was homologous to human IGKV3-11*02 light chain variable region (SEQ ID NO: 79-80). Mouse MN-C2 heavy chain variable region was homologous to human IGHV3-21*04 heavy chain variable region (SEQ ID NO: 132-133) and the light chain variable region was homologous to human IGKV7-3*01 light chain variable region (SEQ ID NO: 182-183). Mouse MN-C3 heavy chain variable region was homologous to human IGHV1-18*04 heavy chain variable region (SEQ ID NO: 427-428) and the light chain variable region was homologous to human IGKV2-29*03 light chain variable region (SEQ ID NO:472-473). Mouse MN-C8 heavy chain variable region was homologous to human IGHV3-21*04 heavy chain variable region (SEQ ID NO: 513-514) and the light chain variable region was homologous to human Z00023 light chain variable region (SEQ ID NO:551-552).

[0192] All four antibodies have been humanized, which process has resulted in several humanized forms of each antibody. CDRs derived from the variable regions of the mouse antibodies were biochemically grafted into a homologous human antibody variable region sequence. Humanized variable regions of MN-E6 (SEQ ID NOS: 38-39 and 93-94), MN-C2 (SEQ ID NOS: 144-145 and 194-195), MN-C3 (SEQ ID NOS: 439-440 and 486-487) and MN-C8 (SEQ ID NOS: 525-526 and 543-544) were generated by grafting the mouse CDRs into the variable region of a homologous human antibody. The humanized heavy chain variable constructs were then fused into constant regions of either human IgG1 heavy chain constant region (SEQ ID NOS:58-59) or human IgG2 heavy chain constant region (SEQ ID NO:54-55), which are then paired with either humanized light chain variable constructs fused to a human kappa chain (SEQ ID NO: 109-110) or human lambda chain (SEQ ID NO: 113-114) constant region. Other IgG isotypes could be used as constant region including IgG3 or IgG4.

[0193] Examples of humanized MN-E6 variable region into an IgG2 heavy chain (SEQ ID NOS:52-53) and into an IgG1 heavy chain (SEQ ID NOS:56-57), humanized MN-C2 variable into an IgG1 heavy chain (SEQ ID NOS: 158-159) or into an IgG2 heavy chain (SEQ ID NOS: 163-164) paired with either Lambda light chain (SEQ ID NO: 111-112 and 216-219) or Kappa chain (SEQ ID NO:107-108 and 210-213) and, humanized MN-C3 (SEQ ID NOS: 455-456, 453-454 and 500-501, 502-503) and MN-C8 (SEQ ID NOS: 541-542, 539-540 and 579-580, 581-582) antibodies were generated. Which IgG constant region is fused to the humanized variable region depends on the desired effect since each isotype has its own characteristic activity. The isotype of the human constant region is selected on the basis of things such as whether antibody dependent cell cytotoxicity (ADCC) or complement dependent cytotoxicity (CDC) is desired but can also depend on the yield of antibody that is generated in cell-based protein expression systems. In a preferred embodiment, humanized anti-MUC1* antibodies or antibody fragments are administered to a person diagnosed with or at risk of developing a MUC1-positive cancer.

[0194] One method for testing and selecting the humanized anti-MUC1* antibodies that would be most useful for the treatment of persons with cancer or at risk of developing cancers is to test them for their ability to inhibit the binding of activating ligands to the MUC1* extracellular domain. Dimeric NME1 can bind to and dimerize the MUC1* extracellular domain and in so doing stimulates cancer cell growth. Antibodies and antibody fragments that compete with NME1 for binding to the MUC1* extracellular domain are therefore anti-cancer agents. NME7 is another activating ligand of MUC1*. In some cases, it is preferable to identify antibodies that block the binding of NME7, or an NME7 truncation or cleavage product, to the MUC1* extracellular domain. Antibodies and antibody fragments that compete with NME7 and NME7 variants for binding to the MUC1* extracellular domain are effective as anti-cancer therapeutics. These antibodies include but are not limited to MN-E6, MN-C2, MN-C3, MN-C8 as well as single chain versions, such as scFv, of these antibodies and humanized version thereof. Other NME proteins also bind to MUC1 or MUC1* including NME6 and NME8. Antibodies that compete with these proteins for binding to MUC1* may also be useful as therapeutics. In a preferred embodiment, humanized anti-MUC1* antibodies or antibody fragments are administered to a person diagnosed with or at risk of developing a MUC1-positive cancer. In a more preferred embodiment, single chain antibody fragments, or monomeric scFv-Fc fusions, derived from humanized sequences of MN-E6 and MN-C2 are administered to a person diagnosed with or at risk of developing a MUC1-positive cancer.

[0195] Single chain variable fragments, scFv, or other forms that result in a monovalent antibody or antibody-like protein are also useful. In some cases it is desired to prevent dimerization of the MUC1* extracellular domain. Single chain variable fragments, Fabs and other monovalent antibody-like proteins have been shown to be effective in binding to the extracellular domain of MUC1* and blocking MUC1* dimerization. These single chain variable fragments, Fabs and other monovalent antibody-like molecules effectively blocked cancer growth in vitro and in animals xenografted with human MUC1-positive cancer cells. Thus, humanized single chain variable fragments or monovalent anti-MUC1* antibodies or antibody-like molecules would be very effective as an anti-cancer therapeutic. Such humanized single chain antibodies, Fabs and other monovalent antibody-like molecules that bind to the MUC1* extracellular domain or to a PSMGFR peptide are therefore useful as anti-cancer therapeutics. Anti-MUC1* single chain variable fragments are generated by grafting non-human CDRs of antibodies, which bind to extracellular domain of MUC1* or bind to PSMGFR peptide, into a framework of a homologous variable region human antibody. The resultant humanized heavy and light chain variable regions are then connected to each other via a suitable linker, wherein the linker should be flexible and of length that it allows heavy chain binding to light chain but discourages heavy chain of one molecule binding to the light chain of another. For example a linker of about 10-15 residues. Preferably, the linker includes [(Glycine)₄ (Serine)₁]₃ (SEQ ID NOS: 401-402), but is not limited to this sequence as other sequences are possible.

[0196] In one aspect, the humanized variable regions of MN-E6 (SEQ ID NOS: 38-39 and 93-94), MN-C2 (SEQ ID NOS: 144-145 and 194-195), MN-C3 (SEQ ID NOS: 439-440 and 486-487) and MN-C8 (SEQ ID NOS: 525-526 and 565-566) are biochemically grafted into a construct that connects heavy and light chains via a linker. Examples of humanized single chain anti-MUC1* antibodies comprising humanized sequences from the variable regions of MN-E6, MN-C2, MN-C3 and MN-C8 were generated. Several humanized MN-E6 single chain proteins were generated (SEQ ID NOS: 232-237). Several humanized MN-C2 single chain proteins were generated (SEQ ID NOS: 238-243). Several humanized MN-C3 single chain proteins were generated (SEQ ID NOS: 244-249). Several humanized MN-C8 single chain proteins were generated (SEQ ID NOS: 250-255). In a preferred embodiment, humanized anti-MUC1* antibody fragments, including variable fragments, scFv antibody fragments MN-E6 scFv, MN-C2 scFv, MN-C3 scFv, or MN-C8 scFv are administered to a person diagnosed with or at risk of developing a MUC1-positive cancer. In a more preferred embodiment, single chain antibody fragments, such as variable fragments derived from humanized sequences of MN-E6 and MN-C2, are administered to a person diagnosed with or at risk of developing a MUC1-positive cancer.

[0197] In another aspect, the humanized variable regions of MN-E6 (SEQ ID NOS: 38-39 and 93-94), MN-C2 (SEQ ID NOS: 144-145 and 194-195), MN-C3 (SEQ ID NOS: 439-440 and 486-487) and MN-C8 (SEQ ID NOS: 525-526 and 565-566) are biochemically grafted into a single chain variable fragment, scFv, that also contains an Fc portion of an antibody. Examples of humanized single chain variable fragment of MN-E6, MN-C2, MN-C3 and MN-C8 fused to a Fc region of an antibody were generated (SEQ ID NOS: 256-257, 260-261, 264-265 and 268-269). Inclusion of an Fc region serves several purposes. It increases the molecular weight of the antibody fragment, which slows degradation and increases half-life. An Fc region also recruits immune system complement to the tumor site. Additionally, the addition of an antibody Fc region makes the scFv a convenient diagnostic tool, as the secondary antibodies detect and label the Fc portion. However, the Fc portion homo-dimerizes. Thus an scFv-Fc would be bivalent and could dimerize and activate the MUC1* growth factor receptor. In order to get the benefits of having an Fc attached to an anti-MUC1* scFv, without the drawback of inducing MUC1* dimerization, the Fc region was mutated to minimize or eliminate Fc homo-dimerization. The following mutations were made in the CH3 domain to create a monomeric scFv-Fc fusion protein: Y407R (SEQ ID NOS: 278 and 279), F405Q (SEQ ID NOS: 280 and 281), T394D (SEQ ID NOS: 282 and 283), T366W/L368W (SEQ ID NOD: 284 and 285), T364R/L368R (SEQ ID NOS: 286 and 285). Any combinations of those mutations can be tested and could be introduced into Fc (SEQ ID NOS: 272-273), CH2-CH3 (SEQ ID NOS: 274-275) or CH3 (SEQ ID NOS: 276-277) fusion proteins or in the hingeless Fc-fusion proteins (SEQ ID NOS: 288-289).

[0198] One aspect of the invention is a method for treating a patient diagnosed with, suspected of having, or at risk of developing a MUC1 positive or MUC1* positive cancer, wherein the patient is administered an effective amount of a monomeric MN-E6 scFv, MN-C2 scFv, MN-C3 scFv, MN-C8 scFv, or MN-E6 scFv-Fc, MN-C2 scFv-Fc, MN-C3 scFv-Fc, MN-C8 scFv-Fc, wherein the antibody variable fragment portions are human or have been humanized and wherein the Fc portion of the antibody-like protein has been mutated such that it resists dimer formation.

[0199] CAR T and Cancer Immuno Therapy Techniques

[0200] In another aspect of the invention, some or all of the single chain portions of anti-MUC1* antibody fragments are biochemically fused onto immune system molecules, using several different chimeric antigen receptor, ‘CAR’ strategies. The idea is to fuse the recognition portion of an antibody, typically as a single chain variable fragment, to an immune system molecule that has a transmembrane domain and a cytoplasmic tail that is able to transmit signals that activate the immune system. The recognition unit can be an antibody fragment, a single chain variable fragment, scFv, or a peptide. In one aspect, the recognition portion of the extracellular domain of the CAR is comprised of sequences from the humanized variable region of MN-E6 (SEQ ID NOS: 38-39 and 93-94), MN-C2 (SEQ ID NOS: 144-145 and 194-195), MN-C3 (SEQ ID NOS: 439-440 and 486-487) and MN-C8 (SEQ ID NOS: 525-526 and 565-566). In another aspect, it is comprised of sequences from a single chain variable fragment. Examples of single chain constructs are given. Several humanized MN-E6 single chain proteins, scFv, were generated (SEQ ID NOS: 232-237). Several humanized MN-C2 single chain proteins, scFv, were generated (SEQ ID NOS: 238-243). Several humanized MN-C3 single chain proteins, scFv, were generated (SEQ ID NOS: 244-249). Several humanized MN-C8 single chain proteins, scFv, were generated (SEQ ID NOS: 250-255). The transmembrane region of the CAR can be derived from CD8, CD4, antibody domains or other transmembrane region, including the transmembrane region of the proximal cytoplasmic co-stimulatory domain. The cytoplasmic tail of the CAR can be comprised of one or more motifs that signal immune system activation. This group of cytoplasmic signaling motifs, sometimes referred to as, co-stimulatory cytoplasmic domains, includes but is not limited to CD3-zeta, CD27, CD28, 4-1BB, OX40, CD30, CD40, PD-1, ICAm-1, LFA-1, ICOS, CD2, CD5, CD7 and Fc receptor gamma domain. A minimal CAR may have the CD3-zeta or an Fc receptor gamma domain then one or two of the above domains in tandem on the cytoplasmic tail. In one aspect, the cytoplasmic tail comprises CD3-zeta, CD28, 4-1BB and/or OX40. Several examples of humanized MN-E6 CARs were generated: CAR MN-E6 CD3z (SEQ ID NOS: 294-295); CAR MN-E6 CD28/CD3z (SEQ ID NOS: 297-298); CAR MN-E6 4-1BB/CD3z (SEQ ID NOS: 300-301); CAR MN-E6 OX40/CD3z (SEQ ID NOS: 616-617); CAR MN-E6 CD28/OX40/CD3z (SEQ ID NOS: 618-619); CAR MN-E6 CD28/4-1BB/CD3z (SEQ ID NOS: 303-304). Several examples of humanized MN-C2 CARs were generated: CAR MN-C2 CD3z (SEQ ID NOS: 606-607); CAR MN-C2 CD28/CD3z (SEQ ID NOS: 608-609); CAR MN-C2 4-1BB/CD3z (SEQ ID NOS: 610-611); CAR MN-C2 OX40/CD3z (SEQ ID NOS: 612-613); CAR MN-C2 CD28/4-1BB/CD3z (SEQ ID NOS: 306-307); CAR MN-C2 CD28/OX40/CD3z (SEQ ID NOS: 614-615). Humanized MN-C3 CAR was generated: CAR MN-C3 4-1BB/CD3z (SEQ ID NOS: 600-601).

[0201] Several examples of humanized MN-E6 CARs with different hinge regions (SEQ ID NOS:345-360) were generated: CAR MN-E6-Fc/8/41BB/CD3z (SEQ ID NOS:310-311); CAR MN-E6 FcH/8/41BB/CD3z (SEQ ID NOS:315-316); CAR MN-E6 Fc/4/41BB/CD3z (SEQ ID NOS:318-319); CAR MN-E6 FcH/4/41BB/CD3z (SEQ ID NOS:321-322); CAR MN-E6 IgD/8/41BB/CD3z (SEQ ID NOS:323-324); CAR MN-E6 IgD/4/41BB/CD3z (SEQ ID NOS:327-328); CAR MN-E6 X4/8/41BB/CD3z (SEQ ID NOS:330-331); CAR MN-E6 X4/4/41BB/CD3z (SEQ ID NOS:333-334); CAR MN-E6 8+4/4/41BB/CD3z (SEQ ID NOS:336-337). In addition, several humanized MN-C3 single chain variable fragment and humanized MN-C8 single chain variable fragments were also generated.

[0202] The extracellular domain recognition unit of a MUC1* targeting CAR can comprise the variable regions of humanized MN-E6, MN-C2, MN-C3 or MN-C8 or other antibody that binds to the PSMGFR portion of MUC1* or a PSMGFR peptide. In one aspect, the extracellular domain recognition unit of a CAR is comprised essentially of a humanized MN-E6, MN-C2, MN-C3 or MN-C8 single chain variable fragment scFv. The transmembrane region of the CAR can be derived from CD8 (SEQ ID NOS:363-364), or can be the transmembrane domain of CD3-zeta, CD28, 41bb, OX40 or other transmembrane region (SEQ ID NOS:361-372) and the cytoplasmic domain of a CAR with antibody fragment targeting MUC1* extracellular domain can be comprised of one or more selected from the group comprising an immune system co-stimulatory cytoplasmic domain. The group of immune system co-stimulatory domains includes but is not limited to CD3-zeta, CD27, CD28, 4-1BB, OX40, CD30, CD40, PD-1, ICAm-1, LFA-1, ICOS, CD2, CD5, CD7 and Fc receptor gamma domain (SEQ ID NOS:373-382). Alternatively, the recognition unit portion of a CAR can comprise a peptide wherein the peptide binds to the target. NME7 binds to and activates MUC1*. In one aspect of the invention, the recognition unit of a CAR is a peptide derived from NME7 (SEQ ID NOS: 5-6) or a peptide derived from NME7, including but not limited to NME7 peptide A1 (SEQ ID NO: 7), NME7 peptide A2 (SEQ ID NO: 8), NME7 peptide B1 (SEQ ID NO: 9), NME7 peptide B2 (SEQ ID NO: 10) and NME7 peptide B3 (SEQ ID NO: 11).

[0203] Some strategies for generating CARs include a portion of the molecule that dimerizes with itself. In some cases, dimerization of the target is not desirable. Therefore CARs can be constructed such that they heterodimerize. In one case the recognition unit of the first CAR binds to a first target while the recognition unit of the second CAR binds to a second target. Both recognition units can be antibody fragments, both can be peptides or one can be an antibody fragment and the other a peptide. A first target of the CAR can be the extracellular domain of MUC1*. The recognition unit of the CAR would be comprised of an antibody fragment that binds to MUC1* extracellular domain or to a PSMGFR peptide. Alternatively, the recognition unit of the CAR would be comprised of a peptide that binds to MUC1* extracellular domain, such peptides include peptides derived from an NME protein such as NME1 or NME7, more particularly NME7 derived peptides listed as SEQ ID NOS: 7-11. A second target of a heterodimeric CAR may be a peptide or antibody fragment that binds to NME7. Alternatively, a second target of a heterodimeric CAR may be a peptide or antibody fragment that binds to PD1 or other target on a MUC1*-presenting cell. A second target may be a peptide or antibody fragment that binds to NME1. Because it is desirable to prevent dimerization of MUC1 induced by a CAR, heterodimeric CARs can be constructed so that only the extracellular domain of one molecule has an extracellular recognition unit that binds to a target (SEQ ID NOS:584-587). The other molecule can have a truncated extracellular domain that is devoid of a target recognition unit or antibody fragment (SEQ ID NOS:588-599). The CARs described can be transfected or transduced into a cell of the immune system. In a preferred embodiment, a MUC1* targeting CAR is transfected or transduced into a T cell. In one aspect the T cell is a CD3+/CD28+ T cell. In another case it is a dendritic cell. In another case it is a B cell. In another case it is a mast cell. The recipient cell can be from a patient or from a donor. If from a donor, it can be engineered to remove molecules that would trigger rejection. Cells transfected or transduced with a CAR of the invention can be expanded ex vivo or in vitro then administered to a patient. Administrative routes are chosen from a group containing but not limited to bone marrow transplant, intravenous injection, in situ injection or transplant. In a preferred embodiment, the MUC1* targeting CAR is administered to a person diagnosed with or at risk of developing a MUC1-positive cancer.

[0204] There are many possible anti-MUC1* CAR constructs that can be transduced into T cells or other immune cells for the treatment or prevention of MUC1* positive cancers. CARs are made up of modules and the identity of some of the modules is relatively unimportant, while the identity of other modules is critically important.

[0205] Our experiments demonstrate that the antibody recognition fragment at the outermost portion of the CAR is critically important because it targets the immune cell bearing the CAR to the tumor site. The intracellular signaling motifs are also very important but can be interchanged. FIG. 28 shows a schematic of the components of CAR and the various sequences that may be included in a CAR. Referring to FIG. 28,

[0206] R1 is: nothing; or

[0207] a ligand or a fragment of a ligand of a cancer associated antigen; or

[0208] a ligand or a fragment of a ligand of MUC1 or MUC1*; or

[0209] an antibody or antibody fragment wherein the antibody or antibody fragment binds to MUC1 or MUC1*; or an antibody or antibody fragment wherein the antibody or antibody fragment binds to PSMGFR*, wherein the antibody may be human or humanized; or an antibody or antibody fragment of MN-E6, MN-C2, MN-C3 or MN-C8 or humanized MN-E6, MN-C2, MN-C3 or MN-C8; or a single chain variable fragment of an antibody, scFv, that binds to a cleaved MUC1 or MUC1*; or a scFv of MN-E6, MN-C2, MN-C3 or MN-C8, which may be humanized; or a peptide that binds to MUC1* or PSMGFR peptide; or is an antibody fragment, a scFv, or a peptide that binds the PSMGFR portion of MUC1*; or is comprised of sequence from the humanized variable region of MN-E6 (SEQ ID NOS: 38-39 and 93-94), MN-C2 (SEQ ID NOS: 144-145 and 194-195), MN-C3 (SEQ ID NOS: 439-440 and 486-487) and MN-C8 (SEQ ID NOS: 525-526 and 565-566). In one aspect R1 is a scFv that binds the PSMGFR portion of MUC1* comprised of sequence from humanized MN-E6 scFv (SEQ ID NOS: 232-237), humanized MN-C2 scFv (SEQ ID NOS: 238-243), humanized MN-C3 scFv (SEQ ID NOS: 244-249) or humanized MN-C8 scFv (SEQ ID NOS: 250-255). In another aspect R1 is a scFv that binds the PSMGFR portion of MUC1* comprised of sequence from humanized MN-E6 scFv (SEQ ID NOS: 232-237) or humanized MN-C2 scFv (SEQ ID NOS: 238-243). In one example R1 is a scFv that binds the PSMGFR portion of MUC1* comprised of sequence from humanized MN-E6 scFv (SEQ ID NOS: 232-237)

[0210] R2 is a polypeptide flexible linker that connects the recognition portion to the transmembrane domain of the CAR. In one aspect, R2 can be a polypeptide linker of different length from 5 to 250 amino acids. In another aspect, R2 is a polypeptide linker of human origin. In one aspect R2 can be made of or a modification of the Fc region of a human immunoglobulin (IgG, IgA, IgE, IgM or IgD). I another aspect, R2 can be the hinge region or a modification of the hinge region of a human immunoglobulin (IgG, IgA, IgE, IgM or IgD). In one aspect, R2 can be the hinge region or a modification of the hinge region of a T-cell receptor (CD8a, CD28 or CD4). In one example, R2 is the hinge region of CD8a, the hinge region of human IgD or the Fc domain of human IgG1.

[0211] R3 is a transmembrane domain. In one aspect, R3 can be a transmembrane domain or a modification of a transmembrane domain of any transmembrane human proteins. In another aspect, R3 can be a transmembrane domain or a modification of a transmembrane domain from human cell receptor. In one aspect, R3 can be a transmembrane domain or a modification of a transmembrane domain of a T-cell receptor (CD8a, CD4, CD28, CD3z, OX40 or 41-BB). In another aspect, R3 is a transmembrane domain from the first cytoplasmic co-stimulatory domain of the CAR. In one aspect, R3 can be a transmembrane domain or a modification of a transmembrane domain of a T-cell receptor extended with 1,2,3,4 or 5 amino acids of the cytoplasmic domain associated to the transmembrane domain. In another aspect, R3 can be a transmembrane domain or a modification of a transmembrane domain of a T-cell receptor extended with 1,2,3,4 or five amino acids of the cytoplasmic domain associated to the transmembrane domain followed by a cystein for disulfide bond formation. In one example, R3 is the transmembrane domain of CD8a or CD4.

[0212] R4 is a signaling domain from a T-cell receptor. In one aspect, R4 can be the cytoplasmic signaling domain of CD3-zeta, CD27, CD28, 4-1BB, OX40, CD30, CD40, PD-1, ICAm-1, LFA-1, ICOS, CD2, CD5, CD7 and Fc receptor gamma domain. In one example, R4 is the cytoplasmic domain of CD3-zeta. Several examples of humanized CAR with single signaling domain (CAR I) were regenerated: CAR MN-E6 CD3z (SEQ ID NOS: 294-295); CAR MN-C2 CD3z (SEQ ID NOS: 606-607)

[0213] R5 is a co-stimulatory domain from a T-cell receptor. In one aspect, R5 can be the cytoplasmic signaling domain of CD27, CD28, 4-1BB, OX40, CD30, CD40, PD-1, ICAm-1, LFA-1, ICOS, CD2, CD5, CD7 and Fc receptor gamma domain. R5 will be different from R4 and R6. In one example, R5 is the cytoplasmic domain of CD28, 4-1BB or OX40. Several examples of humanized CAR with two signaling domain (CAR II) were regenerated: CAR MN-E6 CD28/CD3z (SEQ ID NOS: 297-298); CAR MN-E6 4-1BB/CD3z (SEQ ID NOS: 300-301); CAR MN-E6 OX40/CD3z (SEQ ID NOS: 616-617); CAR MN-C2 CD28/CD3z (SEQ ID NOS: 608-609); CAR MN-C2 4-1BB/CD3z (SEQ ID NOS: 610-611); CAR MN-C2 OX40/CD3z (SEQ ID NOS: 612-613); MN-C3 4-1BB/CD3z (SEQ ID NOS: 600-601); CAR MN-E6-Fc/8/41BB/CD3z (SEQ ID NOS:310-311); CAR MN-E6 FcH/8/41BB/CD3z (SEQ ID NOS:315-316); CAR MN-E6 Fc/4/41BB/CD3z (SEQ ID NOS:318-319); CAR MN-E6 FcH/4/41BB/CD3z (SEQ ID NOS:321-322); CAR MN-E6 IgD/8/41BB/CD3z (SEQ ID NOS:323-324); CAR MN-E6 IgD/4/41BB/CD3z (SEQ ID NOS:327-328); CAR MN-E6 X4/8/41BB/CD3z (SEQ ID NOS:330-331); CAR MN-E6 X4/4/41BB/CD3z (SEQ ID NOS:333-334); CAR MN-E6 8+4/4/41BB/CD3z (SEQ ID NOS:336-337).

[0214] R6 is a co-stimulatory domain from a T-cell receptor. In one aspect, R6 can be the cytoplasmic signaling domain of CD27, CD28, 4-1BB, OX40, CD30, CD40, PD-1, ICAm-1, LFA-1, ICOS, CD2, CD5, CD7 and Fc receptor gamma domain. R6 will be different from R4 and R5. In one example, R5 is the cytoplasmic domain of CD28. Several examples of humanized CAR with two signaling domain (CAR III) were regenerated: CAR MN-E6 CD28/OX40/CD3z (SEQ ID NOS: 618-619); CAR MN-E6 CD28/4-1BB/CD3z (SEQ ID NOS: 303-304); CAR MN-C2 CD28/4-1BB/CD3z (SEQ ID NOS: 306-307); CAR MN-C2 CD28/OX40/CD3z (SEQ ID NOS: 614-615)

[0215] We and others (Pulé M A, Straathof K C, Dotti G, Heslop H E, Rooney C M and Brenner M K. (2005) A chimeric T cell antigen receptor that augments cytokine release and supports clonal expansion of primary human T cells. Mol Ther. 12(5):933-941; Hombach A A, Heiders J, Foppe M, Chmielewski M and Abken H. (2012) OX40 costimulation by a chimeric antigen receptor abrogates CD28 and IL-2 induced IL-10 secretion by redirected CD4(+) T cells. Oncoimmunology. 1(4):458-466; Kowolik C M, Topp M S, Gonzalez S, Pfeiffer T, Olivares S, Gonzalez N, Smith D D, Forman S J, Jensen M C and Cooper L J. (2006) CD28 costimulation provided through a CD19-specific chimeric antigen receptor enhances in vivo persistence and antitumor efficacy of adoptively transferred T cells. Cancer Res. 66(22):10995-11004; Loskog A, Giandomenico V, Rossig C, Pule M, Dotti G and Brenner M K. (2006) Addition of the CD28 signaling domain to chimeric T-cell receptors enhances chimeric T-cell resistance to T regulatory cells. Leukemia. 20(10):1819-1828; Milone M C, Fish J D, Carpenito C, Carroll R G, Binder G K, Teachey D, Samanta M, Lakhal M, Gloss B, Danet-Desnoyers G, Campana D, Riley J L, Grupp S A and June C H. (2009) Chimeric receptors containing CD137 signal transduction domains mediate enhanced survival of T cells and increased antileukemic efficacy in vivo. Mol Ther. 17(8):1453-1464; Song D G, Ye Q, Carpenito C, Poussin M, Wang L P, Ji C, Figini M, June C H, Coukos G, Powell D J Jr. (2011) In vivo persistence, tumor localization, and antitumor activity of CAR-engineered T cells is enhanced by costimulatory signaling through CD137 (4-1BB). Cancer Res. 71(13):4617-4627) have shown that intracellular signaling modules, such as CD3-zeta (SEQ ID NOS: 373-376), CD28 (SEQ ID NOS: 377-378) and 41BB (SEQ ID NOS: 379-380), alone or in combinations stimulate immune cell expansion, cytokine secretion and immune cell mediated killing of the targeted tumor cells. Less important is the identity of the short extracellular piece that presents the antibody fragment, the transmembrane domain, and the short cytoplasmic tail that comes before the intracellular signaling motifs.

[0216] The identity of the recognition antibody fragment that targets the CAR to a tumor is critically important. For the treatment of MUC1 positive or MUC1* positive cancers, that antibody recognition fragment must bind to the extracellular domain of portion of MUC1 that remains after cleavage and shedding of the bulk of the extracellular domain, which contains the tandem repeat domains. In one aspect of the invention, the portion that remains comprises the PSMGFR sequence. In another aspect of the invention, the portion of MUC1 that remains after cleavage and shedding contains the PSMGFR sequence plus nine (9) more amino acids extended at the N-terminus. In another aspect of the invention, the portion of MUC1 that remains after cleavage and shedding contains the PSMGFR sequence plus twenty one (21) more amino acids extended at the N-terminus. In one aspect the antibody recognition fragment binds to a PSMGFR peptide. In another aspect of the invention, the antibody recognition fragment binds to a peptide comprising the sequence SNIKFRPGSVVVQLTLAFREGTINVHDVETQFNQYKTEAASRY (SEQ ID NO:620); or SVVVQLTLAFREGTINVHDVETQFNQYKTEAASRY (SEQ ID NO:621) As a demonstration, a single chain antibody fragment that included the variable domain of the monoclonal anti-MUC1* antibodies called MN-E6 or MN-C2 were engineered into a panel of CARs. The MUC1* targeting CARs were then transduced, separately or in combinations, into immune cells. When challenged with surfaces presenting a MUC1* peptide, an antigen presenting cell transfected with MUC1*, or MUC1* positive cancer cells, the immune cells that were transduced with MUC1* targeting CARs elicited immune responses, including cytokine release, killing of the targeted cells and expansion of the immune cells. In one case, human jurkat cells were transduced with MUC1*-targeting CARs and upon exposure to a surface presenting the PSMGFR peptide, K562 antigen presenting cells that had been transfected with MUC1* or MUC1* positive cancer cells, the jurkhat cells secreted IL-2. In another case, purified human T cells were transduced with MUC1*-targeting CARs and upon exposure to a surface presenting the PSMGFR peptide, K562 antigen presenting cells that had been transfected with MUC1* or MUC1* positive cancer cells, the T cells secreted IL-2, interferon gamma, and killed the targeted antigen presenting cells and cancer cells, while the T cells expanded. As demonstrated, CARs that comprise an antibody fragment, wherein the antibody fragment is able to bind to the PSMGFR peptide, a transmembrane domain and a cytoplasmic tail bearing co-stimulatory domains, elicit an immune system anti-tumor cell response when said CARs are transduced into immune cells, which include T cells. Therefore, other antibodies, antibody fragments or antibody mimics that are able to bind to the PSMGFR peptide will perform similarly and can be used to treat or prevent cancers. Those skilled in the art will recognize that there are a number of technologies available for transfecting or transducing cells with CARs and the invention is not limited by the method used for making the immune cell express a MUC1*-targeting CAR. For example, retroviruses, adeno viruses, lenti viruses and the like can be used. Similarly, the identity of molecules that make up the non-targeting, portions of the CAR such as the extracellular domain, transmembrane domain and membrane proximal portion of the cytoplasmic domain, are not essential to the function of a MUC1*-targeting CAR. For example, the extracellular domain, transmembrane domain and membrane proximal portion of the cytoplasmic domain can be comprised of portions of CD8, CD4, CD28, or generic antibody domains such as Fc, CH2CH3, or CH3. Further, the non-targeting portions of a CAR can be a composite of portions of one or more of these molecules or other family members.

[0217] One aspect of the invention is a method for treating a patient diagnosed with, suspected of having, or at risk of developing a MUC1 positive or MUC1* positive cancer, wherein the patient is administered an effective amount of immune cells that have been transduced with a MUC1* targeting CAR. In another aspect of the invention, the immune cells are T cells isolated from a patient, which are then transduced with CARs wherein the targeting head of the CAR binds to MUC1*, and after expansion of transduced T cells, the CAR T cells are administered in an effective amount to the patient. In yet another aspect of the invention, the immune cells are T cells isolated from a patient, which are then transduced with CARs wherein the targeting head of the CAR comprises portions of huMN-E6, huMN-C2, huMN-C3 or huMN-C8, and after optional expansion of transduced T cells, the CAR T cells are administered in an effective amount to the patient.

[0218] Specifics of CARs Made and Tested

[0219] Many MUC1* targeting CARs were generated wherein the targeting antibody fragment at the distal end of the CAR was either MN-E6, MN-C2, MN-C3 or MN-C8. The DNA of each CAR was sequenced to verify that cloning was correctly done. Each construct was then shuffled into an expression plasmid, transfected into cells and then verified that the construct had successfully inserted by Western blot. Surface expression was verified by FACS. The MUC1* targeting CARs were then virally transduced into immune cells. In one aspect they were transduced into Jurkat cells. In another aspect they were transduced into primary human T cells that were purified from blood. A series of functional assays were performed and verified that the CARs were functional. Functional assays showed that both Jurkat cells and primary T cells transduced with MUC1* targeting CAR secreted the cytokine IL-2 when challenged with cells presenting MUC1*. FIG. 29 is a graph of an experiment measuring IL-2 cytokine secretion by Jurkat cells that were transduced with a panel of CARs, including MN-E6 CD8/CD3z, MN-E6 CD8/CD28/CD3z, MN-E6 CD8/41BB/CD3z, MN-E6 CD4/CD28/CD3z and MN-E6 CD4/CD28/41BB/CD3z. IL-2 was secreted only when the CAR Jurkat cells were exposed to K562-wt cells or K562 cells that had been transfected with MUC1*. It should be noted that the parent K562-wt cells express very low levels of MUC1*. Another group of CARs transfected into Jurkat cells was similarly tested for cytokine secretion. FIG. 30 shows IL-2 secretion by Jurkat T cells that were transduced with MN-E6 CD8/CD28/CD3z, MN-E6 CD8/41BB/CD3z, MN-E6 CD4/CD28/CD3z or MN-E6 CD4/41BB/CD3z, when the CAR T cells were exposed to K562-wt cells or K562 cells that had been transfected with MUC1*. Similarly, FIG. 31 shows IL-2 cytokine secretion by primary human T cells that were transduced with MN-E6 CD8/CD28/CD3z, MN-E6 CD8/41BB/CD3z or MN-E6 CD4/41BB/CD3z. Cytokine secretion only occurred when the MUC1* targeting CAR T cells were exposed to K562-wt cells or K562 cells that had been transfected with MUC1*. Another cytokine that is secreted by activated T cells when they see a target cell is interferon-gamma (IFN-g). FIG. 32 shows that interferon-gamma was secreted by primary human T cells that were transduced with a panel of CARs, including MN-E6 CD8/CD28/CD3z and MN-E6 CD4/41BB/CD3z, when the CAR T cells were exposed to K562-wt cells or K562 cells that had been transfected with MUC1*. Interferon-gamma was similarly secreted by primary human T cells that were transduced with a panel of CARs, including MN-E6 CD8/CD28/CD3z, MN-E6 CD8/41BB/CD3z and MN-E6 CD8/CD28/41BB/CD3z, when the MUC1* targeting CAR T cells were exposed to K562-wt cells, K562 cells that had been transfected with MUC1*, or MUC1* positive cancer cells of prostate cancer (DU145), breast cancer (1500) or pancreatic cancer (Capan) (FIG. 33).

[0220] Another measure of function of CAR T cells is whether or not they induce killing of the targeted cells. T cells transfected with a variety of CARs comprising antibody fragments that bind to the PSMGFR sequence of MUC1* killed MUC1* expressing cells in co-culture assays. In one assay, target MUC1* expressing cells are incubated with calcein. When they are mixed with CAR T cells wherein the CAR comprises an antibody fragment such as MN-E6, MN-C2, MN-C3 or MN-C8 the CAR T cells kill the MUC1* presenting cells which causes the target cells to lyse and releases calcein into the supernatant. FIG. 34 is a graph of an experiment measuring target cell death when primary human T cells, isolated from a blood sample, that were transduced with a panel of CARs, including MN-E6 CD8/CD28/CD3z, MN-E6 CD8/41BB/CD3z and MN-E6 CD4/41BB/CD3z, when the CAR T cells were exposed to K562-wt cells or K562 cells that had been transfected with MUC1*. The ratio of T cells to target cells was 1:1 and the cells were co-cultured for 24 hours. FIG. 35 A-B is a graph of FACS measuring a time course of target cell survival from Day 1 to Day 3. Primary human T cells, isolated from a blood sample, were transduced with a panel of CARs, including humanized MN-E6-CD8-3z, MN-E6-CD8-CD28-3z, MN-E6-CD8-41BB-3z and MN-E6-CD8-CD28-41BB-3z. The CAR T cells were then exposed to K562-wt cells that naturally express low levels of MUC1*, or K562 cells that had been transfected with MUC1* high. The ratio of MUC1* targeting CAR T cells to target cells was either 1:1, 10:1, or 20:1. Surviving cells were detected and measured at Day 1 (A) or Day 3 (B).

[0221] FIG. 36 is a graph of FACS measurements of target cell survival at Day 3 of co-culture experiment. Primary human T cells were transduced with a panel of CARs, including humanized MN-E6-CD8-3z, MN-E6-CD8-CD28-3z, MN-E6-CD8-41BB-3z and MN-E6-CD8-CD28-41BB-3z. The CAR T cells were then exposed to MUC1* positive T47D breast cancer cells or MUC1* positive 1500 aka ZR-75-1 breast cancer cells. The ratio of MUC1* targeting CAR T cells to target cells was either 1:1 or 10:1. As can be seen from the graph, T cells transduced with a MUC1* targeting CAR have a much greater killing effect on MUC1* cancer cells than the untransduced control T cells. In addition, the killing effect is much greater when the ratio of T cells: target cells is increased. FIG. 37 is a graph of FACS measurements of target cell survival at Day 1 of co-culture experiment. Primary human T cells were transduced with a panel of CARs, including humanized MN-E6-CD8-41BB-3z, MN-E6-CD4-41BB-3z, and MN-E6-CD8-CD28-41BB-3z. The CAR T cells were then exposed to the following MUC1* positive cancer cells: T47D breast cancer; capan2 pancreatic cancer; or DU-145 prostate cancer. The ratio of MUC1* targeting CAR T cells to target cells was 5:1. As can be seen from the graph, T cells transduced with a MUC1* targeting CAR have a much greater killing effect on MUC1* cancer cells than the untransduced control T cells. Note that the measurements were taken after 24 hours with only a 5:1 T cell to target cell ratio. Also note that MUC1* targeting CARs that have a CD4 extracellular domain-transmembrane-cytoplasmic tail work equally well as CD8 constructs. FIG. 38 is a graph of FACS measurements of target cell survival at Day 3 of co-culture experiment. Primary human T cells were transduced with a panel of CARs, including humanized MN-E6-CD8-41BB-3z, MN-E6-CD4-41BB-3z, and MN-E6-CD8-CD28-41BB-3z. The CAR T cells were then exposed to the following MUC1* positive cancer cells: K562 leukemia cells transfected with MUC1*; T47D breast cancer; 1500 aka ZR-75-1 breast cancer cells; or CAPAN-2 pancreatic cancer cells. In addition to the untransduced T cell controls, the assay was performed on PC3 MUC1* negative prostate cancer cells. The ratio of MUC1* targeting CAR T cells to target cells was 1:1. As can be seen from the graph, T cells transduced with a MUC1* targeting CAR have a much greater killing effect on MUC1* cancer cells than the untransduced control T cells. In addition, the killing effect is specific for MUC1* positive cells. Note that MUC1* targeting CARs that have a CD4 extracellular domain-transmembrane-cytoplasmic tail work equally well as CD8 constructs. FIG. 39 is a graph of FACS measurements of CAR T cell expansion over 24 hours in co-culture with target cells at a ratio of 5:1 CAR T cells to target cells. The primary human T cells were transduced with a panel of CARs, including humanized MN-E6-CD8-41BB-3z, MN-E6-CD4-41BB-3z, and MN-E6-CD8-CD28-41BB-3z. The CAR T cells were co-cultured with MUC1* positive T47D breast cancer cells, MUC1* positive Capan pancreatic cancer cells, and MUC1-negative cells HCT-116 colon cancer cells and HEK-293 human embryonic kidney cells. As can be seen from the graph, the CAR T population is increased in the presence of MUC1* positive cells. FIG. 40 shows a photograph of a Western blot of MUC1* targeting CARs. From 1 to 9 are: 1. MN-E6scFv-Fc-8-41BB-CD3z (Human Fc as hinge region with CD8 TM); 2: MN-E6scFv-FcH-8-41BB-CD3z (Human Fc hingeless as hinge region with CD8 TM); 3: MN-E6scFv-Fc-4-41BB-CD3z (Human Fc as hinge region with CD4 TM); 4: MN-E6scFv-FcH-4-41BB-CD3z (Human Fc as hingeless hinge region with CD4 TM); 5: MN-E6scFv-IgD-8-41BB-CD3z (hinge region from human IgD with CD8 TM); 6: MN-E6scFv-IgD-4-41BB-CD3z (hinge region from human IgD with CD4 TM); 7: MN-E6scFv-X4-8-41BB-CD3z (Long flexible linker as hinge region with CD8 TM); 8: MN-E6scFv-X4-4-41BB-CD3z (Long flexible linker as hinge region with CD4 TM); 9: MN-E6scFv-8-4-41BB-CD3z (Hinge region from CD8 and CD4 a with CD4 TM).

[0222] FIG. 41 shows graphs of FACS scans of T47D breast cancer cells co-cultured with human T cells that were transduced with MN-E6scFv-Fc-8-41BB-CD3z, MN-E6scFv-FcH-8-41BB-CD3z (hingeless), MN-E6scFv-Fc-4-41BB-CD3z, MN-E6scFv-IgD-8-41BB-CD3z, MN-E6scFv-X4-8-41BB-CD3z and MN-E6scFv-X4-4-41BB-CD3z. T cells and cancer cells were co-cultured at a 1:1 ratio for 48 hours. T cell counts were normalized to an average of all untransduced T cells and target cells were normalized to each specific cell type when co-cultured with untransduced T cells. The graph shows that when the CAR T cells are co-cultured with MUC1* positive cancer cells, the T cell population expands and the targeted cancer cell population decreases.

[0223] FIG. 42 shows graphs of FACS scans of T47D breast cancer cells, Capan-2 pancreatic cancer cells, K562-MUC1* transfected cells, and K562-wt cells that were co-cultured with human T cells that were transduced with MN-E6scFv-Fc-8-41BB-CD3z, MN-E6scFv-FcH-8-41BB-CD3z, MN-E6scFv-Fc-4-41BB-CD3z, MN-E6scFv-IgD-8-41BB-CD3z, MN-E6scFv-X4-8-41BB-CD3z and MN-E6scFv-X4-4-41BB-CD3z. T cells and cancer cells were co-cultured at a 1:1 ratio for 48 hours. T cell counts were normalized to an average of all untransduced T cells and target cells were normalized to each specific cell type when co-cultured with untransduced T cells. The graph shows that when the CAR T cells are co-cultured with MUC1* positive cancer cells, the T cell population expands and the targeted cancer cell population decreases.

[0224] As these experiments demonstrate, the critical portion of a CAR is the antibody fragment that directs the immune cell to the tumor cell. As we will show in the following section, MN-E6 and MN-C2 are specific for the form of MUC1* that is expressed on tumor cells. The next most important part of a CAR is the cytoplasmic tail bearing immune system co-stimulatory domains. The identity of these domains modulates the degree of immune response but in no way effect the specificity. As shown, the identity of the transmembrane portion of a CAR is the least important. It appears that as long as the transmembrane portion has some flexibility and is long enough to allow the antibody fragment to reach its cognate receptor on the tumor cell, it will suffice. This is demonstrated in FIGS. 40-42. CARs comprising the MN-E6 targeting antibody fragment, and intracellular co-stimulatory domains 41BB and CD3-zeta but having a variety of different extracellular, transmembrane and short cytoplasmic tail all worked in that they specifically killed the targeted cells while stimulating the expansion of the host T cells. These CARs with variable mid-sections are: MN-E6scFv-Fc-8-41BB-CD3z (Human Fc as hinge region with CD8 TM); 2: MN-E6scFv-FcH-8-41BB-CD3z (Human Fc hingeless as hinge region with CD8 TM); 3: MN-E6scFv-Fc-4-41BB-CD3z (Human Fc as hinge region with CD4 TM); 4: MN-E6scFv-FcH-4-41BB-CD3z (Human Fc as hingeless hinge region with CD4 TM); 5: MN-E6scFv-IgD-8-41BB-CD3z (hinge region from human IgD with CD8 TM); 6: MN-E6scFv-IgD-4-41BB-CD3z (hinge region from human IgD with CD4 TM); 7: MN-E6scFv-X4-8-41BB-CD3z (Long flexible linker as hinge region with CD8 TM); 8: MN-E6scFv-X4-4-41BB-CD3z (Long flexible linker as hinge region with CD4 TM); 9: MN-E6scFv-8-4-41BB-CD3z (Hinge region from CD8 and CD4 a with CD4 TM).

[0225] One aspect of the invention is a method for treating a patient diagnosed with, suspected of having, or at risk of developing a MUC1 positive or MUC1* positive cancer, wherein the patient is administered an effective amount of immune cells that have been transduced with a MUC1* targeting CAR, wherein the CAR is chosen from among the group consisting of MN-E6-CD8-3z; MN-E6-CD4-3z; MN-E6-CD8-CD28-3z; MN-E6-CD4-CD28-3z; MN-E6-CD8-41BB-3z; MN-E6-CD4-41BB-3z; MN-E6-CD8-CD28-41BB-3z; MN-E6-CD4-CD28-41BB-3z; MN-E6scFv-Fc-8-41BB-CD3z; MN-E6scFv-FcH-8-41BB-CD3z; MN-E6scFv-Fc-4-41BB-CD3z; MN-E6scFv-FcH-4-41BB-CD3z; MN-E6scFv-IgD-8-41BB-CD3z; MN-E6scFv-IgD-4-41BB-CD3z; MN-E6scFv-X4-8-41BB-CD3z; MN-E6scFv-X4-4-41BB-CD3z; MN-E6scFv-8-4-41BB-CD3z, or any of the aforementioned CARs wherein the MN-E6 is replaced by MN-C2, MN-C3 or MN-C8. Another aspect of the invention is a method for treating a patient diagnosed with, suspected of having, or at risk of developing a cancer, wherein the patient is administered an effective amount of immune cells that have been transduced with one of the aforementioned CARs wherein the MN-E6 is replaced by a peptide comprising antibody variable domain fragments that are specific for a cancer antigen. In any of the above methods, the immune cell may be a T cell and may further be isolated from the patient to be treated.

[0226] Specificity of Anti-MUC1* Targeting Antibodies

[0227] The most accurate way of demonstrating antibody specificity is testing the antibody on normal human tissue specimens compared to cancerous tissue specimens. MN-C2 and MN-E6 were shown to specifically bind to MUC1 or MUC1* positive cancer cells. Several breast tumor arrays were assayed using several anti-MUC1 or MUC1* antibodies. Essentially the studies involving serial sections of breast cancer tissue specimens from over 1,200 different breast cancer patients showed that very little full-length MUC1 remains on breast cancer tissues. The vast majority of the MUC1 expressed is MUC1* and is stained by MN-C2. The analysis was performed by Clarient Diagnostics and tissue staining was scored using the Allred method. For example, FIG. 43 shows serial sections of breast cancer tissue arrays that were stained with either VU4H5, a commercially available anti-MUC1 antibody that binds to the tandem repeats, or MN-C2 that binds to MUC1*. FIGS. 43 and 44 are photographs of breast cancer tissue arrays stained with either VU4H5 which recognizes MUC1-FL (full length) or MN-C2 which recognizes cancerous MUC1*. Tissue staining was scored using Allred scoring method which combines an intensity score and a distribution score. Below the photographs of the tissue arrays are color-coded graphs displaying the results. As can be seen, the arrays stained with VU4H5 are very light and many tissues do not stain at all despite the published reports that MUC1 is aberrantly expressed on over 96% of all breast cancers as evidenced by nucleic acid based diagnostics. In contrast, the arrays stained with MN-C2 are very dark (red versus yellow or white in graph). Additionally, many tissues did not stain at all with anti-full-length MUC1 but stained very dark with MN-C2, (see green boxes in graph). Similarly, we stained normal or cancerous breast tissues with humanized MN-E6 scFv-Fc. The antibody fragment was biotinylated so it could be visualized by a secondary streptavidin based secondary. As can be seen in FIG. 45, hMN-E6 scFv-Fc does not stain normal breast tissue but stains cancerous breast tissue. Further, the intensity and homogeneity of staining increases with tumor grade and/or metastatic grade of the patient (FIGS. 45 and 46). Similarly, hMN-E6 scFv-Fc did not stain normal lung tissue but did stain lung cancer tissue (FIGS. 47-51) and the intensity and distribution of staining increased as tumor grade or metastatic grade increased. FIG. 52 shows photographs of normal small intestine and cancerous small intestine tissues stained with humanized MN-E6-scFv-Fc biotinylated anti-MUC1* antibody at 5 ug/mL, then stained with a secondary streptavidin HRP antibody. A) is a normal small intestine tissue. B) is small intestine cancer from patient as denoted in the figure. C,D are photographs of the corresponding serial sections that were stained with the secondary antibody alone. FIG. 53 shows photographs of normal small intestine tissues stained with humanized MN-E6-scFv-Fc anti-MUC1* antibody at 50 ug/mL, then stained with a secondary goat-anti-human HRP antibody. A-D are normal small intestine tissue. E-H are photographs of the corresponding serial sections that were stained with the secondary antibody alone. FIG. 54 shows photographs of cancerous small intestine tissues stained with humanized MN-E6-scFv-Fc anti-MUC1* antibody at 50 ug/mL, then stained with a secondary goat-anti-human HRP antibody. A-D are cancerous small intestine tissue from a patient as denoted in figure. E-H are photographs of the corresponding serial sections that were stained with the secondary antibody alone. FIG. 55 shows photographs of cancerous small intestine tissues stained with humanized MN-E6-scFv-Fc anti-MUC1* antibody at 50 ug/mL, then stained with a secondary goat-anti-human HRP antibody. A-D are cancerous small intestine tissue from a patient as denoted in figure. E-H are photographs of the corresponding serial sections that were stained with the secondary antibody alone. FIG. 56 shows photographs of normal colon tissues stained with humanized MN-E6-scFv-Fc anti-MUC1* antibody at 50 ug/mL, then stained with a secondary goat-anti-human HRP antibody. A-D are normal colon. E-H are photographs of the corresponding serial sections that were stained with the secondary antibody alone. FIG. 57 shows photographs of colon cancer tissues stained with humanized MN-E6-scFv-Fc anti-MUC1* antibody at 50 ug/mL, then stained with a secondary goat-anti-human HRP antibody. A-D are colon cancer tissue from a metastatic patient as denoted in figure. E-H are photographs of the corresponding serial sections that were stained with the secondary antibody alone. FIG. 58 shows photographs of colon cancer tissues stained with humanized MN-E6-scFv-Fc anti-MUC1* antibody at 50 ug/mL, then stained with a secondary goat-anti-human HRP antibody. A-D are colon cancer tissue from a Grade 2 patient as denoted in figure. E-H are photographs of the corresponding serial sections that were stained with the secondary antibody alone. FIG. 59 shows photographs of colon cancer tissues stained with humanized MN-E6-scFv-Fc anti-MUC1* antibody at 50 ug/mL, then stained with a secondary goat-anti-human HRP antibody. A-D are colon cancer tissue from a metastatic patient as denoted in figure. E-H are photographs of the corresponding serial sections that were stained with the secondary antibody alone. FIG. 60 shows photographs of prostate cancer tissues stained with humanized MN-E6-scFv-Fc anti-MUC1* antibody at 50 ug/mL, then stained with a secondary goat-anti-human HRP antibody. A-D are prostate cancer tissue from a patient as denoted in figure. E-H are photographs of the corresponding serial sections that were stained with the secondary antibody alone. FIG. 61 shows photographs of prostate cancer tissues stained with humanized MN-E6-scFv-Fc anti-MUC1* antibody at 50 ug/mL, then stained with a secondary goat-anti-human HRP antibody. A-D are prostate cancer tissue from a patient as denoted in figure. E-H are photographs of the corresponding serial sections that were stained with the secondary antibody alone. FIG. 62 shows photographs of prostate cancer tissues stained with humanized MN-E6-scFv-Fc anti-MUC1* antibody at 50 ug/mL, then stained with a secondary goat-anti-human HRP antibody. A-D are prostate cancer tissue from a patient as denoted in figure. E-H are photographs of the corresponding serial sections that were stained with the secondary antibody alone.

[0228] One aspect of the invention is a method for treating a patient diagnosed with, suspected of having, or at risk of developing a MUC1 positive or MUC1* positive cancer, wherein a specimen is obtained from the patient's cancer and is tested for reactivity with an antibody that binds to PSMGFR SEQ ID NO:2, SNIKFRPGSVVVQLTLAFREGTINVHDVETQFNQYKTEAASRY (SEQ ID NO:620) or SVVVQLTLAFREGTINVHDVETQFNQYKTEAASRY (SEQ ID NO:621). The patient is then treated with an scFv, scFv-Fc or CAR T that comprises antibody variable fragments from the antibody that reacted with their cancer specimen. Another aspect of the invention is a method for treating a patient diagnosed with, suspected of having, or at risk of developing a MUC1 positive or MUC1* positive cancer, wherein a specimen is obtained from the patient's cancer and is tested for reactivity with MN-E6-scFv, MN-C2-scFv, MN-C3-scFv or MN-C8-scFv; the patient is then treated with the scFv, scFv-Fc-mut or CAR T that comprises portions of the antibody that reacted with their cancer specimen.

[0229] BiTEs

[0230] Divalent (or bivalent) single-chain variable fragments (di-scFvs, bi-scFvs) can be engineered by linking two scFvs. This can be done by producing a single peptide chain with two V_{H} and two V_{L} regions, yielding tandem scFvs. Another possibility is the creation of scFvs with linker peptides that are too short for the two variable regions to fold together (about five amino acids), forcing scFvs to dimerize. This type is known as diabodies. Diabodies have been shown to have dissociation constants up to 40-fold lower than corresponding scFvs, meaning that they have a much higher affinity to their target. Consequently, diabody drugs could be dosed much lower than other therapeutic antibodies and are capable of highly specific targeting of tumors in vivo. Still shorter linkers (one or two amino acids) lead to the formation of trimers, so-called triabodies or tribodies. Tetrabodies have also been produced. They exhibit an even higher affinity to their targets than diabodies.

[0231] All of these formats can be composed from variable fragments with specificity for two different antigens, in which case they are types of bispecific antibodies. The furthest developed of these are bispecific tandem di-scFvs, known as hi-specific T-cell engagers (BiTE antibody constructs). BiTEs are fusion proteins consisting of two scFvs of different antibodies, on a single peptide chain of about 55 kilodaltons. One of the scFvs may bind to T cells such as via the CD3 receptor, and the other to a tumor cell via a tumor specific molecule, such aberrantly expressed MUC1*.

[0232] Another aspect of the invention is a method for treating a patient diagnosed with, suspected of having, or at risk of developing a MUC1 positive or MUC1* positive cancer, wherein the patient is administered an effective amount of a BiTE wherein one antibody variable fragment of the BiTE binds to a T cell surface antigen and the other antibody variable fragment of the BiTE binds to PSMGFR SEQ ID NO:2, SNIKFRPGSVVVQLTLAFREGTINVHDVETQFNQYKTEAASRY (SEQ ID NO:620) or SVVVQLTLAFREGTINVHDVETQFNQYKTEAASRY (SEQ ID NO:621). In one case, the antibody variable fragment of the BiTE that binds to MUC1* comprises portions of huMN-E6, huMN-C2, huMN-C3, or huMN-C8.

[0233] In another aspect of the invention, MUC1* peptides including PSMGFR SEQ ID NO:2, most or all of SNIKFRPGSVVVQLTLAFREGTINVHDVETQFNQYKTEAASRY (SEQ ID NO:620) or SVVVQLTLAFREGTINVHDVETQFNQYKTEAASRY (SEQ ID NO:621) are used in adoptive T cell approaches. In this case, a patient's T cells are exposed to the MUC1* peptides and through various rounds of maturation, the T cells develop MUC1* specific receptors. The adapted T cells are then expanded and administered to the donor patient who is diagnosed with, suspected of having, or is at risk of developing a MUC1* positive cancer.

[0234] Other MUC1 Cleavage Sites

[0235] However, MUC1 is cleaved to the growth factor receptor form, MUC1*, on some healthy cells in addition to cancer cells. For example, MUC1 is cleaved to MUC1* on healthy stem and progenitor cells. A large percentage of bone marrow cells are MUC1* positive. Portions of the intestine are MUC1* positive.

[0236] The inventors have discovered that MUC1 can be cleaved at different positions that are relatively close to each other but the location of cleavage changes the fold of the remaining portion of the extracellular domain. As a result, monoclonal antibodies can be identified that bind to MUC1* cleaved at a first position but do not bind to MUC1* that has been cleaved at a second position. This discovery is disclosed in WO2014/028668, filed Aug. 14, 2013, the contents of which are incorporated by reference herein its entirety. We identified a set of anti-MUC1* monoclonal antibodies that bind to a MUC1* as it appears on cancer cells but do not bind to MUC1* as it appears on stem and progenitor cells. Conversely, we identified a second set of monoclonal antibodies that bind to stem and progenitor cells but do not bind to cancer cells. One method used to identify stem specific antibodies is as follows: supernatants from monoclonal hybridomas were separately adsorbed onto 2 multi-well plates. Stem cells, which are non-adherent cells, were put into one plate and cancer cells which are adherent were put into an identical plate. After an incubation period, the plates were rinsed and inverted. If the non-adherent stem cells stuck to the plate, then the monoclonal in that particular well recognizes stem cells and will not recognize cancer cells. Antibodies that did not capture stem cells or antibodies that captured cancer cells were identified as cancer specific stem cells. FACS analysis has confirmed this method works. Antibodies MN-E6 and MN-C2 are examples of cancer-specific antibodies. Antibodies MN-C3 and MN-C8 are examples of stem-specific antibodies. Although both sets of antibodies are able to bind to a peptide having the PSMGFR sequence, FACS analysis shows that the anti-MUC1* polyclonal antibody and MN-C3 bind to MUC1* positive bone marrow cells but MN-E6 does not. The MUC1* polyclonal antibody was generated by immunizing a rabbit with the PSMGFR peptide. Similarly, MN-C3 binds to stem cells of the intestinal crypts but MN-E6 does not. Conversely, MN-E6 antibody binds to cancerous tissue while the stem-specific MN-C3 does not. Competition ELISA experiments indicate that the C-terminal 10 amino acids of the PSMGFR peptide are required for MN-E6 and MN-C2 binding, but not for MN-C3 and MN-C8. Therefore, another method for identifying antibodies that are cancer specific is to immunize with a peptide having the sequence of the PSMGFR peptide minus the 10 N-terminal amino acids or use that peptide to screen for antibodies or antibody fragments that will be cancer specific. Antibodies that bind to a peptide with a sequence of PSMGFR peptide minus the N-terminal 10 amino acids but do not bind to a peptide with a sequence of PSMGFR peptide minus the C-terminal 10 amino acids are cancer specific antibodies for use in the treatment or prevention of cancers.

[0237] The extracellular domain of MUC1 is also cleaved on stem cells and some progenitor cells, where activation of cleaved MUC1 by ligands NME1 in dimer form or NME7 promotes growth and pluripotency and inhibits differentiation. The transmembrane portion of MUC1 that remains after cleavage is called MUC1* and the extracellular domain is comprised essentially of the Primary Sequence of MUC1 Growth Factor Receptor (PSMGFR) sequence. However, the exact site of cleavage can vary depending on cell type, tissue type, or which cleavage enzyme a particular person expresses or overexpresses. In addition to the cleavage site that we previously identified which leaves the transmembrane portion of MUC1* comprising most or all of the PSMGFR SEQ ID NO:2, other cleavage sites result in an extended MUC1* comprised of most or all of SNIKFRPGSVVVQLTLAFREGTINVHDVETQFNQYKTEAASRY (SEQ ID NO:620); or SVVVQLTLAFREGTINVHDVETQFNQYKTEAASRY (SEQ ID NO:621). The site of MUC1 cleavage affects how the remaining extracellular domain folds. We have identified monoclonal antibodies that bind to cleaved MUC1* on cancer cells but do not bind to cleaved MUC1* as it exists on healthy stem and progenitor cells.

[0238] Whereas an anti-MUC1* antibody or antibody-like molecule may be most effective if it competitively inhibits the binding of NME1, NME6, NME8 or NME7 or NME7-AB to MUC1*, for example an antibody that binds to the PSMGFR sequence especially if said antibody is unable to bind to a PSMGFR peptide if the 10 C-terminal amino acids are missing, antibodies or antibody-like molecules that carry a payload need not competitively inhibit the binding of MUC1* ligands to be effective as anti-cancer agents. For example antibodies or antibody-like molecules that are conjugated to a toxin could be effective at killing target cancer cells without necessarily inhibiting binding of the activating ligands. For example, antibodies or antibody-like molecules such as CARs or BiTEs which recruit the patient's immune system to the tumor can be effective as anti-cancer agents even if the antibody fragment targets a portion of MUC1* such that antibody fragment binding does not competitively inhibit the binding of NME1, NME6, NME8, NME7-AB or NME7. In a preferred embodiment the antibody fragment incorporated into a CAR, an adaptive T cell receptor or a BiTE does competitively inhibit the binding of NME1, NME6, NME8, NME7-AB or NME7 to MUC1*.

[0239] Antibodies that are able to bind to the extracellular domain of the remaining transmembrane portion block the interaction between the MUC1* extracellular domain and activating ligands and in this way can be used as therapeutic agents, for example for the treatment of cancers. Anti-MUC1* antibodies are also useful for the growth, delivery, identification or isolation of stem cells both in vitro and in vivo.

[0240] General Strategy for Using Antibodies, Antibody Fragments and CARs that Target the Extracellular Domain of MUC1*

[0241] Monoclonal antibodies MN-C3 and MN-C8 have a greater binding affinity for stem cells than cancer cells. Humanized antibodies and antibody fragments containing sequences derived from the variable regions of MN-C3 and MN-C8 can be used as an adhesion surface coating for human stem cells.

[0242] Alternatively, humanized antibodies and antibody fragments containing sequences derived from the variable regions of MN-C3 and MN-C8 can be used to deliver stem cells to a specific location such as for in situ human therapeutics. In one case, a substrate coated with humanized MN-C3 or MN-C8 derived antibodies or antibody fragments is loaded with stem cells then inserted into a patient. In another case, a substrate coated with humanized MN-C3 or MN-C8 derived antibodies or antibody fragments is inserted into a patient in order to recruit the patient's own stem cells to a specific area for therapy. Human therapies in which antibodies that bind to human stem cells will be of therapeutic use include spinal cord repair. Substrates coated with humanized MN-C3 or MN-C8 derived antibodies or antibody fragments are also used to identify or isolate human antibodies. Humanized MN-C3 or MN-C8 derived antibodies can also be used to stimulate the growth of stem cells.

[0243] Sequence Listing Free Text

[0244] As regards the use of nucleotide symbols other than a, g, c, t, they follow the convention set forth in WIPO Standard ST.25, Appendix 2, Table 1, wherein k represents t or g; n represents a, c, t or g; m represents a or c; r represents a or g; s represents c or g; w represents a or t and y represents c or t.

MUC1 Receptor
(Mucin 1 precursor, Genbank Accession number: P15941)
(SEQ ID NO: 1)
MTPGTQSPFFLLLLLTVLTVVTGSGHASSTPGGEKETSATQRSSVPSSTEKNAVSMTSSVLSSHSPGSGSSTT
QGQDVTLAPATEPASGSAATWGQDVTSVPVTRPALGSTTPPAHDVTSAPDNKPAPGSTAPPAHGVTSAPDTRP
APGSTAPPAHGVTSAPDTRPAPGSTAPPAHGVTSAPDTRPAPGSTAPPAHGVTSAPDTRPAPGSTAPPAHGVT
SAPDTRPAPGSTAPPAHGVTSAPDTRPAPGSTAPPAHGVTSAPDTRPAPGSTAPPAHGVTSAPDTRPAPGSTA
PPAHGVTSAPDTRPAPGSTAPPAHGVTSAPDTRPAPGSTAPPAHGVTSAPDTRPAPGSTAPPAHGVTSAPDTR
PAPGSTAPPAHGVTSAPDTRPAPGSTAPPAHGVTSAPDTRPAPGSTAPPAHGVTSAPDTRPAPGSTAPPAHGV
TSAPDTRPAPGSTAPPAHGVTSAPDTRPAPGSTAPPAHGVTSAPDTRPAPGSTAPPAHGVTSAPDTRPAPGST
APPAHGVTSAPDTRPAPGSTAPPAHGVTSAPDTRPAPGSTAPPAHGVTSAPDTRPAPGSTAPPAHGVTSAPDT
RPAPGSTAPPAHGVTSAPDTRPAPGSTAPPAHGVTSAPDTRPAPGSTAPPAHGVTSAPDTRPAPGSTAPPAHG
VTSAPDTRPAPGSTAPPAHGVTSAPDTRPAPGSTAPPAHGVTSAPDTRPAPGSTAPPAHGVTSAPDTRPAPGS
TAPPAHGVTSAPDTRPAPGSTAPPAHGVTSAPDTRPAPGSTAPPAHGVTSAPDTRPAPGSTAPPAHGVTSAPD
TRPAPGSTAPPAHGVTSAPDTRPAPGSTAPPAHGVTSAPDTRPAPGSTAPPAHGVTSAPDTRPAPGSTAPPAH
GVTSAPDTRPAPGSTAPPAHGVTSAPDTRPAPGSTAPPAHGVTSAPDTRPAPGSTAPPAHGVTSAPDNRPALG
STAPPVHNVTSASGSASGSASTLVHNGTSARATTTPASKSTPFSIPSHHSDTPTTLASHSTKTDASSTHHSSV
PPLTSSNHSTSPQLSTGVSFFFLSFHISNLQFNSSLEDPSTDYYQELQRDISEMFLQIYKQGGFLGLSNIKFR
PGSVVVQLTLAFREGTINVHDVETQFNQYKTEAASRYNLTISDVSVSDVPFPFSAQSGAGVPGWGIALLVLVC
VLVALAIVYLIALAVCQCRRKNYGQLDIFPARDTYHPMSEYPTYHTHGRYVPPSSTDRSPYEKVSAGNGGSSL
SYTNPAVAAASANL
PSMGFR
(SEQ ID NO: 2)
GTINVHDVETQFNQYKTEAASRYNLTISDVSVSDVPFPFSAQSGA
Human NME1
(DNA)
(SEQ ID NO: 3)
atggccaactgtgagcgtaccttcattgcgatcaaaccagatggggtccagcggggtcttgtgggagagatta
tcaagcgttttgagcagaaaggattccgccttgttggtctgaaattcatgcaagcttccgaagatcttctcaa
ggaacactacgttgacctgaaggaccgtccattctttgccggcctggtgaaatacatgcactcagggccggta
gttgccatggtctgggaggggctgaatgtggtgaagacgggccgagtcatgctcggggagaccaaccctgcag
actccaagcctgggaccatccgtggagacttctgcatacaagttggcaggaacattatacatggcagtgattc
tgtggagagtgcagagaaggagatcggcttgtggtttcaccctgaggaactggtagattacacgagctgtgct
cagaactggatctatgaatga
(amino acids)
(SEQ ID NO: 4)
MANCERTFIAIKPDGVQRGLVGEIIKRFEQKGFRLVGLKFMQASEDLLKEHYVDLKDRPFFAGLVKYMHSGPV
VAMVWEGLNVVKTGRVMLGETNPADSKPGTIRGDFCIQVGRNIIHGSDSVESAEKEIGLWFHPEELVDYTSCA
QNWIYE-
Human NME7
(DNA)
(SEQ ID NO: 5)
atgaatcatagtgaaagattcgttttcattgcagagtggtatgatccaaatgcttcacttcttcgacgttatg
agcttttattttacccaggggatggatctgttgaaatgcatgatgtaaagaatcatcgcacctttttaaagcg
gaccaaatatgataacctgcacttggaagatttatttataggcaacaaagtgaatgtcttttctcgacaactg
gtattaattgactatggggatcaatatacagctcgccagctgggcagtaggaaagaaaaaacgctagccctaa
ttaaaccagatgcaatatcaaaggctggagaaataattgaaataataaacaaagctggatttactataaccaa
actcaaaatgatgatgctttcaaggaaagaagcattggattttcatgtagatcaccagtcaagaccctttttc
aatgagctgatccagtttattacaactggtcctattattgccatggagattttaagagatgatgctatatgtg
aatggaaaagactgctgggacctgcaaactctggagtggcacgcacagatgcttctgaaagcattagagccct
ctttggaacagatggcataagaaatgcagcgcatggccctgattcttttgcttctgcggccagagaaatggag
ttgttttttccttcaagtggaggttgtgggccggcaaacactgctaaatttactaattgtacctgttgcattg
ttaaaccccatgctgtcagtgaaggactgttgggaaagatcctgatggctatccgagatgcaggttttgaaat
ctcagctatgcagatgttcaatatggatcgggttaatgttgaggaattctatgaagtttataaaggagtagtg
accgaatatcatgacatggtgacagaaatgtattctggcccttgtgtagcaatggagattcaacagaataatg
ctacaaagacatttcgagaattttgtggacctgctgatcctgaaattgcccggcatttacgccctggaactct
cagagcaatctttggtaaaactaagatccagaatgctgttcactgtactgatctgccagaggatggcctatta
gaggttcaatacttcttcaagatcttggataattag
(amino acids)
(SEQ ID NO: 6)
MNHSERFVFIAEWYDPNASLLRRYELLFYPGDGSVEMHDVKNHRTFLKRTKYDNLHLEDLFIGNKVNVFSRQL
VLIDYGDQYTARQLGSRKEKTLALIKPDAISKAGEIIEIINKAGFTITKLKMMMLSRKEALDFHVDHQSRPFF
NELIQFITTGPIIAMEILRDDAICEWKRLLGPANSGVARTDASESIRALFGTDGIRNAAHGPDSFASAAREME
LFFPSSGGCGPANTAKFTNCTCCIVKPHAVSEGLLGKILMAIRDAGFEISAMQMFNMDRVNVEEFYEVYKGVV
TEYHDMVTEMYSGPCVAMEIQQNNATKTFREFCGPADPEIARHLRPGTLRAIFGKTKIQNAVHCTDLPEDGLL
EVQYFFKILDN-
NME7 peptides
NME7A peptide 1 (A domain):
(SEQ ID NO: 7)
MLSRKEALDFHVDHQS
NME7A peptide 2 (A domain):
(SEQ ID NO: 8)
SGVARTDASES
NME7B peptide 1 (B domain):
(SEQ ID NO: 9)
DAGFEISAMQMFNMDRVNVE
NME7B peptide 2 (B domain):
(SEQ ID NO: 10)
EVYKGVVTEYHDMVTE
NME7B peptide 3 (B domain):
(SEQ ID NO: 11)
AIFGKTKIQNAVHCTDLPEDGLLEVQYFF
Mouse E6 Heavy chain variable region sequence:
(DNA)
(SEQ ID NO: 12)
gaggtgaaggtggtggagtctgggggagacttagtgaagcctggagggtccctgaaactctcctgtgtagtct
ctggattcactttcagtagatatggcatgtcttgggttcgccagactccaggcaagaggctggagtgggtcgc
aaccattagtggtggcggtacttacatctactatccagacagtgtgaaggggcgattcaccatctccagagac
aatgccaagaacaccctgtacctgcaaatgagcagtctgaagtctgaggacacagccatgtatcactgtacaa
gggataactacggtaggaactacgactacggtatggactactggggtcaaggaacctcagtcaccgtctcctc
a
(amino acids)
(SEQ ID NO: 13)
EVKVVESGGDLVKPGGSLKLSCVVSGFTFSRYGMSWVRQTPGKRLEWVATISGGGTYIYYPDSVKGRFTISRD
NAKNTLYLQMSSLKSEDTAMYHCTRDNYGRNYDYGMDYWGQGTSVTVSS
Mouse E6 heavy chain variable framework region 1 (FWR1) sequence:
(DNA)
(SEQ ID NO: 14)
gaggtgaaggtggtggagtctgggggagacttagtgaagcctggagggtccctgaaactctcctgtgtagtct
ct
(amino acids)
(SEQ ID NO: 15)
EVKVVESGGDLVKPGGSLKLSCVVSGFTFS
Mouse E6 heavy chain variable complementarity determining regions 1
(CDR1) sequence:
(DNA)
(SEQ ID NO: 16)
ggattcactttcagtagatatggcatgtct
(amino acids)
(SEQ ID NO: 17)
RYGMS
Mouse E6 heavy chain variable framework region 2 (FWR2) sequence:
(DNA)
(SEQ ID NO: 18)
tgggttcgccagactccaggcaagaggctggagtgggtcgca
(amino acids)
(SEQ ID NO: 19)
WVRQTPGKRLEWVA
Mouse E6 heavy chain variable complementarity determining regions 2
(CDR2) sequence:
(DNA)
(SEQ ID NO: 20)
accattagtggtggcggtacttacatctactatccagacagtgtgaagggg
(amino acids)
(SEQ ID NO: 21)
TISGGGTYIYYPDSVKG
Mouse E6 heavy chain variable framework region 3 (FWR3) acid sequence:
(DNA)
(SEQ ID NO: 22)
cgattcaccatctccagagacaatgccaagaacaccctgtacctgcaaatgagcagtctgaagtctgaggaca
cagccatgtatcactgtacaagg
(amino acids)
(SEQ ID NO: 23)
RFTISRDNAKNTLYLQMSSLKSEDTAMYHCTR
Mouse E6 heavy chain variable complementarity determining regions 3
(CDR3) sequence:
(DNA)
(SEQ ID NO: 24)
gataactacggtaggaactacgactacggtatggactac
(amino acids)
(SEQ ID NO: 25)
DNYGRNYDYGMDY
IGHV3-21*03 heavy chain variable region sequence:
(DNA)
(SEQ ID NO: 26)
gaggtgcagctggtggagtctgggggaggcctggtcaagcctggggggtccctgagactctcctgtgcagcct
ctggattcaccttcagtagctatagcatgaactgggtccgccaggctccagggaaggggctggagtgggtctc
atccattagtagtagtagtagttacatatactacgcagactcagtgaagggccgattcaccatctccagagac
aacgccaagaactcactgtatctgcaaatgaacagcctgagagccgaggacacggctgtgtattactgtgcga
ga
(amino acids)
(SEQ ID NO: 27)
EVQLVESGGGLVKPGGSLRLSCAASGFTFSSYSMNWVRQAPGKGLEWVSSISSSSSYIYYADSVKGRFTISRD
NAKNSLYLQMNSLRAEDTAVYYCAR
IGHV3-21*01 heavy chain variable framework region 1 (FWR1) sequence:
(DNA)
(SEQ ID NO: 28)
gaggtgcagctggtggagtctgggggaggcctggtcaagcctggggggtccctgagactctcctgtgcagcct
ctggattcaccttcagt
(amino acids)
(SEQ ID NO: 29)
EVQLVESGGGLVKPGGSLRLSCAASGFTFS
IGHV3-21*01 heavy chain variable complementarity determining regions 1
(CDR1) sequence:
(DNA)
(SEQ ID NO: 30)
agctatagcatgaac
(amino acids)
(SEQ ID NO: 31)
SYSMN
IGHV3-21*01 heavy chain variable framework region 2 (FWR2) sequence:
(DNA)
(SEQ ID NO: 32)
tgggtccgccaggctccagggaaggggctggagtgggtctca
(amino acids)
(SEQ ID NO: 33)
WVRQAPGKGLEWVS
IGHV3-21*01 heavy chain variable complementarity determining regions 2
(CDR2) sequence:
(DNA)
(SEQ ID NO: 34)
tccattagtagtagtagtagttacatatactacgcagactcagtgaagggc
(amino acids)
(SEQ ID NO: 35)
SISSSSSYIYYADSVKG
IGHV3-21*01 heavy chain variable framework region 3 (FWR3) sequence:
(DNA)
(SEQ ID NO: 36)
cgattcaccatctccagagacaacgccaagaactcactgtatctgcaaatgaacagcctgagagccgaggaca
cggctgtgtattactgtgcgaga
(amino acids)
(SEQ ID NO: 37)
RFTISRDNAKNSLYLQMNSLRAEDTAVYYCAR
Humanized E6 heavy chain variable region sequence:
(DNA)
(SEQ ID NO: 38)
gaggtgcagctggtggagtctgggggaggcctggtcaagcctggggggtccctgagactctcctgtgcagcct
ctggattcaccttcagtaggtatggcatgagctgggtccgccaggctccagggaagaggctggagtgggtctc
aaccattagtggcggaggcacctacatatactacccagactcagtgaagggccgattcaccatctccagagac
aacgccaagaacaccctgtatctgcaaatgaacagcctgagagccgaggacacggctgtgtattactgtacca
gagataactatggccgcaactatgattatggcatggattattggggccagggcaccctggtgaccgtgagcag
c
(amino acids)
(SEQ ID NO: 39)
EVQLVESGGGLVKPGGSLRLSCAASGFTFSRYGMSWVRQAPGKRLEWVSTISGGGTYIYYPDSVKGRFTISRD
NAKNTLYLQMNSLRAEDTAVYYCTRDNYGRNYDYGMDYWGQGTLVTVSS
Humanized E6 heavy chain variable framework region 1 (FWR1) acid
sequence:
(DNA)
(SEQ ID NO: 40)
gaggtgcagctggtggagtctgggggaggcctggtcaagcctggggggtccctgagactctcctgtgcagcct
ctggattcaccttcagt
(amino acids)
(SEQ ID NO: 41)
VQLVESGGGLVKPGGSLRLSCAASGFTFS
Humanized E6 heavy chain variable complementarity determining regions 1
(CDR1) sequence:
(DNA)
(SEQ ID NO: 42)
aggtatggcatgagc
(amino acids)
(SEQ ID NO: 43)
RYGMS
Humanized E6 heavy chain variable framework region 2 (FWR2) acid
sequence:
(DNA)
(SEQ ID NO: 44)
tgggtccgccaggctccagggaagaggctggagtgggtctca
(amino acids)
(SEQ ID NO: 45)
WVRQAPGKRLEWVS
Humanized E6 heavy chain variable complementarity determining regions 2
(CDR2) sequence:
(DNA)
(SEQ ID NO: 46)
accattagtggcggaggcacctacatatactacccagactcagtgaagggc
(amino acids)
(SEQ ID NO: 47)
TISGGGTYIYYPDSVKG
Humanized E6 heavy chain variable framework region 3 (FWR3) acid
sequence:
(DNA)
(SEQ ID NO: 48)
cgattcaccatctccagagacaacgccaagaacaccctgtatctgcaaatgaacagcctgagagccgaggaca
cggctgtgtattactgtaccaga
(amino acids)
(SEQ ID NO: 49)
RFTISRDNAKNTLYLQMNSLRAEDTAVYYCTR
Humanized E6 heavy chain variable complementarity determining regions 3
(CDR3) sequence:
(DNA)
(SEQ ID NO: 50)
gataactatggccgcaactatgattatggcatggattat
(amino acids)
(SEQ ID NO: 51)
DNYGRNYDYGMDY
Humanized E6 IgG2 heavy chain synthesized by Genescript:
(DNA)
(SEQ ID NO: 52)
gaattctaagcttgggccaccatggaactggggctccgctgggttttccttgttgctattttagaaggtgtcc
agtgtgaggtgcagctggtggagtctgggggaggcctggtcaagcctggggggtccctgagactctcctgtgc
agcctctggattcaccttcagtaggtatggcatgagctgggtccgccaggctccagggaagaggctggagtgg
gtctcaaccattagtggcggaggcacctacatatactacccagactcagtgaagggccgattcaccatctcca
gagacaacgccaagaacaccctgtatctgcaaatgaacagcctgagagccgaggacacggctgtgtattactg
taccagagataactatggccgcaactatgattatggcatggattattggggccagggcaccctggtgaccgtg
agcagcgcctccaccaagggcccatcggtcttccccctggcgccctgctccaggagcacctccgagagcacag
ccgccctgggctgcctggtcaaggactacttccccgaaccggtgacggtgtcgtggaactcaggcgctctgac
cagcggcgtgcacaccttcccagctgtcctacagtcctcaggactctactccctcagcagcgtggtgaccgtg
ccctccagcaacttcggcacccagacctacacctgcaacgtagatcacaagcccagcaacaccaaggtggaca
agacagttgagcgcaaatgttgtgtcgagtgcccaccgtgcccagcaccacctgtggcaggaccgtcagtctt
cctcttccccccaaaacccaaggacaccctcatgatctcccggacccctgaggtcacgtgcgtggtggtggac
gtgagccacgaagaccccgaggtccagttcaactggtacgtggacggcgtggaggtgcataatgccaagacaa
agccacgggaggagcagttcaacagcacgttccgtgtggtcagcgtcctcaccgttgtgcaccaggactggct
gaacggcaaggagtacaagtgcaaggtctccaacaaaggcctcccagcccccatcgagaaaaccatctccaaa
accaaagggcagccccgagaaccacaggtgtacaccctgcccccatcccgggaggagatgaccaagaaccagg
tcagcctgacctgcctggtcaaaggcttctaccccagcgacatcgccgtggagtgggagagcaatgggcagcc
ggagaacaactacaagaccacacctcccatgctggactccgacggctccttcttcctctacagcaagctcacc
gtggacaagagcaggtggcagcaggggaacgtcttctcatgctccgtgatgcatgaggctctgcacaaccact
acacgcagaagagcctctccctgtctccgggtaaatagtaagtttaaactctaga
(amino acids)
(SEQ ID NO: 53)
EF*AWATMELGLRWVFLVAILEGVQCEVQLVESGGGLVKPGGSLRLSCAASGFTFSRYGMSWVRQAPGKRLEW
VSTISGGGTYIYYPDSVKGRFTISRDNAKNTLYLQMNSLRAEDTAVYYCTRDNYGRNYDYGMDYWGQGTLVTV
SSASTKGPSVFPLAPCSRSTSESTAALGCLVKDYFPEPVTVSWNSGALTSGVHTFPAVLQSSGLYSLSSVVTV
PSSNFGTQTYTCNVDHKPSNTKVDKTVERKCCVECPPCPAPPVAGPSVFLFPPKPKDTLMISRTPEVTCVVVD
VSHEDPEVQFNWYVDGVEVHNAKTKPREEQFNSTFRVVSVLTVVHQDWLNGKEYKCKVSNKGLPAPIEKTISK
TKGQPREPQVYTLPPSREEMTKNQVSLTCLVKGFYPSDIAVEWESNGQPENNYKTTPPMLDSDGSFFLYSKLT
VDKSRWQQGNVFSCSVMHEALHNHYTQKSLSLSPGK**V*TLX
Human IgG2 heavy chain constant region sequence:
(DNA)
(SEQ ID NO: 54)
gcctccaccaagggcccatcggtcttccccctggcgccctgctccaggagcacctccgagagcacagccgccc
tgggctgcctggtcaaggactacttccccgaaccggtgacggtgtcgtggaactcaggcgctctgaccagcgg
cgtgcacaccttcccagctgtcctacagtcctcaggactctactccctcagcagcgtggtgaccgtgccctcc
agcaacttcggcacccagacctacacctgcaacgtagatcacaagcccagcaacaccaaggtggacaagacag
ttgagcgcaaatgttgtgtcgagtgcccaccgtgcccagcaccacctgtggcaggaccgtcagtcttcctctt
ccccccaaaacccaaggacaccctcatgatctcccggacccctgaggtcacgtgcgtggtggtggacgtgagc
cacgaagaccccgaggtccagttcaactggtacgtggacggcgtggaggtgcataatgccaagacaaagccac
gggaggagcagttcaacagcacgttccgtgtggtcagcgtcctcaccgttgtgcaccaggactggctgaacgg
caaggagtacaagtgcaaggtctccaacaaaggcctcccagcccccatcgagaaaaccatctccaaaaccaaa
gggcagccccgagaaccacaggtgtacaccctgcccccatcccgggaggagatgaccaagaaccaggtcagcc
tgacctgcctggtcaaaggcttctaccccagcgacatcgccgtggagtgggagagcaatgggcagccggagaa
caactacaagaccacacctcccatgctggactccgacggctccttcttcctctacagcaagctcaccgtggac
aagagcaggtggcagcaggggaacgtcttctcatgctccgtgatgcatgaggctctgcacaaccactacacgc
agaagagcctctccctgtctccgggtaaatag
(amino acids)
(SEQ ID NO: 55)
ASTKGPSVFPLAPCSRSTSESTAALGCLVKDYFPEPVTVSWNSGALTSGVHTFPAVLQSSGLYSLSSVVTVPS
SNFGTQTYTCNVDHKPSNTKVDKTVERKCCVECPPCPAPPVAGPSVFLFPPKPKDTLMISRTPEVTCVVVDVS
HEDPEVQFNWYVDGVEVHNAKTKPREEQFNSTFRVVSVLTVVHQDWLNGKEYKCKVSNKGLPAPIEKTISKTK
GQPREPQVYTLPPSREEMTKNQVSLTCLVKGFYPSDIAVEWESNGQPENNYKTTPPMLDSDGSFFLYSKLTVD
KSRWQQGNVFSCSVMHEALHNHYTQKSLSLSPGK
Humanized E6 IgG1 heavy chain sequence:
(DNA)
(SEQ ID NO: 56)
gaggtgcagctggtggagtctgggggaggcctggtcaagcctggggggtccctgagactctcctgtgcagcct
ctggattcaccttcagtaggtatggcatgagctgggtccgccaggctccagggaagaggctggagtgggtctc
aaccattagtggcggaggcacctacatatactacccagactcagtgaagggccgattcaccatctccagagac
aacgccaagaacccactgtatctgcaaatgaacagcctgagagccgaggacacggctgtgtattactgtccca
gagataactatggccgcaactatgattatggcatggattattggggccagggcaccctggtgaccgtgagcag
cgctagcaccaagggcccatcggtcttccccctggcaccctcctccaagagcacctctgggggcacagcggcc
ctgggctgcctggtcaaggactacttccccgaaccggtgacggtgtcgtggaactcaggcgccctgaccagcg
gcgtgcacaccttcccggctgtcctacagtcctcaggactctactccctcagcagcgtggtgacagtgccctc
cagcagcttgggcacccagacctacatctgcaacgtgaatcacaagcccagcaacaccaaggtggacaagaaa
gttgagcccaaatcttgtgacaaaactcacacatgcccaccgtgcccagcacctgaactcctggggggaccgt
cagtcttcctcttccccccaaaacccaaggacaccctcatgatctcccggacccctgaggtcacatgcgtggt
ggtggacgtgagccacgaagaccctgaggtcaagttcaactggtacgtggacggcgtggaggtgcataatgcc
aagacaaagccgcgggaggagcagtacaacagcacgtaccgtgtggtcagcgtcctcaccgtcctgcaccagg
actggctgaatggcaaggagtacaagtgcaaggtctccaacaaagccctcccagcccccatcgagaaaaccat
ctccaaagccaaagggcagccccgagaaccacaggtgtacaccctgcccccatcccgggaggagatgaccaag
aaccaggtcagcctgacctgcctggtcaaaggcttctatcccagcgacatcgccgtggagtgggagagcaatg
ggcagccggagaacaactacaagaccacgcctcccgtgctggactccgacggctccttcttcctctacagcaa
gctcaccgtggacaagagcaggtggcagcaggggaacgtcttctcatgctccgtgatgcatgaggctctgcac
aaccactacacgcagaagagcctctccctgtctccgggtaaatgataa
(amino acids)
(SEQ ID NO: 57)
EVQLVESGGGLVKPGGSLRLSCAASGFTFSRYGMSWVRQAPGKRLEWVSTISGGGTYIYYPDSVKGRFTISRD
NAKNPLYLQMNSLRAEDTAVYYCPRDNYGRNYDYGMDYWGQGTLVTVSSASTKGPSVFPLAPSSKSTSGGTAA
LGCLVKDYFPEPVTVSWNSGALTSGVHTFPAVLQSSGLYSLSSVVTVPSSSLGTQTYICNVNHKPSNTKVDKK
VEPKSCDKTHTCPPCPAPELLGGPSVFLFPPKPKDTLMISRTPEVTCVVVDVSHEDPEVKFNWYVDGVEVHNA
KTKPREEQYNSTYRVVSVLTVLHQDWLNGKEYKCKVSNKALPAPIEKTISKAKGQPREPQVYTLPPSREEMTK
NQVSLTCLVKGFYPSDIAVEWESNGQPENNYKTTPPVLDSDGSFFLYSKLTVDKSRWQQGNVFSCSVMHEALH
NHYTQKSLSLSPGK**
Human IgG1 heavy chain constant region sequence:
(DNA)
(SEQ ID NO: 58)
gctagcaccaagggcccatcggtcttccccctggcaccctcctccaagagcacctctgggggcacagcggccc
tgggctgcctggtcaaggactacttccccgaaccggtgacggtgtcgtggaactcaggcgccctgaccagcgg
cgtgcacaccttcccggctgtcctacagtcctcaggactctactccctcagcagcgtggtgacagtgccctcc
agcagcttgggcacccagacctacatctgcaacgtgaatcacaagcccagcaacaccaaggtggacaagaaag
ttgagcccaaatcttgtgacaaaactcacacatgcccaccgtgcccagcacctgaactcctggggggaccgtc
agtcttcctcttccccccaaaacccaaggacaccctcatgatctcccggacccctgaggtcacatgcgtggtg
gtggacgtgagccacgaagaccctgaggtcaagttcaactggtacgtggacggcgtggaggtgcataatgcca
agacaaagccgcgggaggagcagtacaacagcacgtaccgtgtggtcagcgtcctcaccgtcctgcaccagga
ctggctgaatggcaaggagtacaagtgcaaggtctccaacaaagccctcccagcccccatcgagaaaaccatc
tccaaagccaaagggcagccccgagaaccacaggtgtacaccctgcccccatcccgggaggagatgaccaaga
accaggtcagcctgacctgcctggtcaaaggcttctatcccagcgacatcgccgtggagtgggagagcaatgg
gcagccggagaacaactacaagaccacgcctcccgtgctggactccgacggctccttcttcctctacagcaag
ctcaccgtggacaagagcaggtggcagcaggggaacgtcttctcatgctccgtgatgcatgaggctctgcaca
accactacacgcagaagagcctctccctgtctccgggtaaatgataa
(amino acids)
(SEQ ID NO: 59)
ASTKGPSVFPLAPSSKSTSGGTAALGCLVKDYFPEPVTVSWNSGALTSGVHTFPAVLQSSGLYSLSSVVTVPS
SSLGTQTYICNVNHKPSNTKVDKKVEPKSCDKTHTCPPCPAPELLGGPSVFLFPPKPKDTLMISRTPEVTCVV
VDVSHEDPEVKFNWYVDGVEVHNAKTKPREEQYNSTYRVVSVLTVLHQDWLNGKEYKCKVSNKALPAPIEKTI
SKAKGQPREPQVYTLPPSREEMTKNQVSLTCLVKGFYPSDIAVEWESNGQPENNYKTTPPVLDSDGSFFLYSK
LTVDKSRWQQGNVFSCSVMHEALHNHYTQKSLSLSPGK**
Human IgG1 heavy chain constant region gBLOCK#1 sequence:
(DNA)
(SEQ ID NO: 60)
atggcatggattattggggccagggcaccctggtgaccgtgagcagcgctagcaccaagggcccatcggtctt
ccccctggcaccctcctccaagagcacctctgggggcacagcggccctgggctgcctggtcaaggactacttc
cccgaaccggtgacggtgtcgtggaactcaggcgccctgaccagcggcgtgcacaccttcccggctgtcctac
agtcctcaggactctactccctcagcagcgtggtgacagtgccctccagcagcttgggcacccagacctacat
ctgcaacgtgaatcacaagcccagcaacaccaaggtggacaagaaagttgagcccaaatcttgtgacaaaact
cacacatgcccaccgtgcccagcacctgaactcctggggggaccgtcagtcttcctcttccccccaaaaccca
aggacaccctcatgatctcccggacccctgaggtcacatgcgtggtggtggacgtgagccacgaagaccctga
ggtcaagttcaactggtacgtggacggcgtggaggtgcataatgccaag
Human IgG1 heavy chain constant region gBLOCK#2 sequence:
(DNA)
(SEQ ID NO: 61)
tacgtggacggcgtggaggtgcataatgccaagacaaagccgcgggaggagcagtacaacagcacgtaccgtg
tggtcagcgtcctcaccgtcctgcaccaggactggctgaatggcaaggagtacaagtgcaaggtctccaacaa
agccctcccagcccccatcgagaaaaccatctccaaagccaaagggcagccccgagaaccacaggtgtacacc
ctgcccccatcccgggaggagatgaccaagaaccaggtcagcctgacctgcctggtcaaaggcttctatccca
gcgacatcgccgtggagtgggagagcaatgggcagccggagaacaactacaagaccacgcctcccgtgctgga
ctccgacggctccttcttcctctacagcaagctcaccgtggacaagagcaggtggcagcaggggaacgtcttc
tcatgctccgtgatgcatgaggctctgcacaaccactacacgcagaagagcctctccctgtctccgggtaaat
gataagtttaaacccgctgatcagcctcgactgtgccttctagttg
E6 heavy chain variable region overlapping sequence:
(DNA)
(SEQ ID NO: 62)
atggcatggattattggggccagggcaccct
IgG1 heavy chain constant region overlapping region sequence:
(DNA)
(SEQ ID NO: 63)
tacgtggacggcgtggaggtgcataatgccaag
pCDNA3.1 V5 and pSECTag2 overlapping sequence:
(DNA)
(SEQ ID NO: 64)
ccgctgatcagcctcgactgtgccttctagttg
Mouse E6 Light Chain variable region sequence:
(DNA)
(SEQ ID NO: 65)
caaattgttctcacccagtctccagcaatcatgtctgcatctccaggggaggaggtcaccctaacct
gcagtgccacctcaagtgtaagttacatacactggttccagcagaggccaggcacttctcccaaact
ctggatttatagcacatccaacctggcttctggagtccctgttcgcttcagtggcagtggatatggg
acctcttactctctcacaatcagccgaatggaggctgaagatgctgccacttattactgccagcaaa
ggagtagttccccattcacgttcggctcggggacaaagttggaaataaaa
(amino acids)
(SEQ ID NO: 66)
QIVLTQSPAIMSASPGEEVTLTCSATSSVSYIHWFQQRPGTSPKLWIYSTSNLASGVPVRFSGSGYGTSYSLT
ISRMEAEDAATYYCQQRSSSPFTFGSGTKLEIK
Mouse E6 light chain variable framework region 1 (FWR1) sequence:
(DNA)
(SEQ ID NO: 67)
caaattgttctcacccagtctccagcaatcatgtctgcatctccaggggaggaggtcaccctaacctgc
(amino acids)
(SEQ ID NO: 68)
QIVLTQSPAIMSASPGEEVTLTC
Mouse E6 light chain variable complementarity determining regions 1
(CDR1) sequence:
(DNA)
(SEQ ID NO: 69)
AGTGCCACCTCAAGTGTAAGTTACATACAC
(amino acids)
(SEQ ID NO: 70)
SATSSVSYIH
Mouse E6 light chain variable framework region 2 (FWR2) sequence:
(DNA)
(SEQ ID NO: 71)
tggttccagcagaggccaggcacttctcccaaactctggatttat
(amino acids)
(SEQ ID NO: 72)
WFQQRPGTSPKLWIY
Mouse E6 light chain variable complementarity determining regions 2
(CDR2) sequence:
(DNA)
(SEQ ID NO: 73)
agcacatccaacctggcttct
(amino acids)
(SEQ ID NO: 74)
STSNLAS
Mouse E6 light chain variable framework region 3 (FWR3) sequence:
(DNA)
(SEQ ID NO: 75)
ggagtccctgttcgcttcagtggcagtggatatgggacctcttactctctcacaatcagccgaatggaggctg
aagatgctgccacttattactgc
(amino acids)
(SEQ ID NO: 76)
GVPVRFSGSGYGTSYSLTISRMEAEDAATYYC
Mouse E6 light chain variable complementarity determining regions 3
(CDR3) sequence:
(DNA)
(SEQ ID NO: 77)
cagcaaaggagtagttccccattcacg
(amino acids)
(SEQ ID NO: 78)
QQRSSSPFT
IGKV3-11*02 light chain variable region sequence:
(DNA)
(SEQ ID NO: 79)
gaaattgtgttgacacagtctccagccaccctgtctttgtctccaggggaaagagccaccctctcctgcaggg
ccagtcagagtgttagcagctacttagcctggtaccaacagaaacctggccaggctcccaggctcctcatcta
tgatgcatccaacagggccactggcatcccagccaggttcagtggcagtgggtctgggagagacttcactctc
accatcagcagcctagagcctgaagattttgcagtttattactgtcagcagcgtagcaactggcctcc
(amino acids)
(SEQ ID NO: 80)
EIVLTQSPATLSLSPGERATLSCRASQSVSSYLAWYQQKPGQAPRLLIYDASNRATGIPA
RFSGSGSGRDFTLTISSLEPEDFAVYYCQQRSNWPP
IGKV3-11*02 light chain variable framework region 1 (FWR1) acid sequence:
(DNA)
(SEQ ID NO: 81)
gaaattgtgttgacacagtctccagccaccctgtctttgtctccaggggaaagagccaccctctcctgc
(amino acids)
(SEQ ID NO: 82)
EIVLTQSPATLSLSPGERATLSC
IGKV3-11*02 light chain variable complementarity determining regions 1
(CDR1) sequence:
(DNA)
(SEQ ID NO: 83)
agggccagtcagagtgttagcagctacttagcc
(amino acids)
(SEQ ID NO: 84)
RASQSVSSYLA
IGKV3-11*02 light chain variable framework region 2 (FWR2) sequence:
(DNA)
(SEQ ID NO: 85)
tggtaccaacagaaacctggccaggctcccaggctcctcatctat
(amino acids)
(SEQ ID NO: 86)
WYQQKPGQAPRLLIY
IGKV3-11*02 light chain variable complementarity determining regions 2
(CDR2) sequence:
(DNA)
(SEQ ID NO: 87)
gatgcatccaacagggccact
(amino acids)
(SEQ ID NO: 88)
DASNRAT
IGKV3-11*02 light chain variable framework region 3 (FWR3) sequence:
(DNA)
(SEQ ID NO: 89)
ggcatcccagccaggttcagtggcagtgggtctgggagagacttcactctcaccatcagcagcctagagcctg
aagattttgcagtttattactgt
(amino acids)
(SEQ ID NO: 90)
GIPARFSGSGSGTDFTLTISSLEPEDFAVYYC
IGKV3-11*02 light chain variable complementarity determining regions3
(CDR3) sequence:
(DNA)
(SEQ ID NO: 91)
cagcagcgtagcaactggcctcc
(amino acids)
(SEQ ID NO: 92)
QQRSNWPP
Humanized E6 light chain variable region sequence:
(DNA)
(SEQ ID NO: 93)
gaaattgtgttgacacagtctccagccaccctgtctttgtctccaggggaaagagccaccctcacctgcagcg
ccaccagcagtgttagctacatccactggtaccaacagaggcctggccagagccccaggctcctcatctatag
cacctccaacctggccagcggcatcccagccaggttcagtggcagtgggtctgggagcgactacactctcacc
atcagcagcctagagcctgaagattttgcagtttattactgtcagcagcgtagcagctcccctttcacctttg
gcagcggcaccaaagtggaaattaaa
(amino acids)
(SEQ ID NO: 94)
EIVLTQSPATLSLSPGERATLTCSATSSVSYIHWYQQRPGQSPRLLIYSTSNLASGIPARFSGSGSGSDYTLT
ISSLEPEDFAVYYCQQRSSSPFTFGSGTKVEIK
Humanized E6 light chain variable framework region 1 (FWR1) acid
sequence:
(DNA)
(SEQ ID NO: 95)
gaaattgtgttgacacagtctccagccaccctgtctttgtctccaggggaaagagccaccctcacctgc
(amino acids)
(SEQ ID NO: 96)
EIVLTQSPATLSLSPGERATLTC
Humanized E6 light chain variable complementarity determining regions 1
(CDR1) sequence:
(DNA)
(SEQ ID NO: 97)
agcgccaccagcagtgttagctacatccac
(amino acids)
(SEQ ID NO: 98)
SATSSVSYIH
Humanized E6 heavy light variable framework region 2 (FWR2) acid
sequence:
(DNA)
(SEQ ID NO: 99)
tggtaccaacagaggcctggccagagccccaggctcctcatctat
(amino acids)
(SEQ ID NO: 100)
WYQQRPGQSPRLLIY
Humanized E6 light chain variable complementarity determining regions 2
(CDR2) sequence:
(DNA)
(SEQ ID NO: 101)
agcacctccaacctggccagc
(amino acids)
(SEQ ID NO: 102)
STSNLAS
Humanized E6 light chain variable framework region 3 (FWR3) acid
sequence:
(DNA)
(SEQ ID NO: 103)
ggcatcccagccaggttcagtggcagtgggtctgggagcgactacactctcaccatcagcagcctagagcctg
aactattttgcagtttattactgt
(amino acids)
(SEQ ID NO: 104)
GIPARFSGSGSGSDYTLTISSLEPEDFAVYYC
Humanized E6 light chain variable complementarity determining regions 3
(CDR3) sequence:
(DNA)
(SEQ ID NO: 105)
cagcagcgtagcagctcccctttcacc
(amino acids)
(SEQ ID NO: 106)
QQRSSSPFT
Humanized E6 Kappa light chain synthesized by Genescript:
(DNA)
(SEQ ID NO: 107)
gaattctaagcttgggccaccatggaagccccagcgcagcttctcttcctcctgctactctggctcccagata
ccactggagaaattgtgttgacacagtctccagccaccctgtctttgtctccaggggaaagagccaccctcac
ctgcagcgccaccagcagtgttagctacatccactggtaccaacagaggcctggccagagccccaggctcctc
atctatagcacctccaacctggccagcggcatcccagccaggttcagtggcagtgggtctgggagcgactaca
ctctcaccatcagcagcctagagcctgaagattttgcagtttattactgtcagcagcgtagcagctccccttt
cacctttggcagcggcaccaaagtggaaattaaaaggacggtggctgcaccatctgtcttcatcttcccgcca
tctgatgagcagttgaaatctggaactgcctctgttgtgtgcctgctgaataacttctatcccagagaggcca
aagtacagtggaaggtggataacgccctccaatcgggtaactcccaggagagtgtcacagagcaggacagcaa
ggacagcacctacagcctcagcagcaccctgacgctgagcaaagcagactacgagaaacacaaagtctacgcc
tgcgaagtcacccatcagggcctgagctcgcccgtcacaaagagcttcaacaggggagagtgttagtaagttt
aaactctaga
(amino acids)
(SEQ ID NO: 108)
EF*AWATMEAPAQLLFLLLLWLPDTTGEIVLTQSPATLSLSPGERATLTCSATSSVSYIHWYQQRPGQSPRLL
IYSTSNLASGIPARFSGSGSGSDYTLTISSLEPEDFAVYYCQQRSSSPFTFGSGTKVEIKRTVAAPSVFIFPP
SDEQLKSGTASVVCLLNNFYPREAKVQWKVDNALQSGNSQESVTEQDSKDSTYSLSSTLTLSKADYEKHKVYA
CEVTHQGLSSPVTKSFNRGEC**V*TLX
Human Kappa light chain constant region sequence:
(DNA)
(SEQ ID NO: 109)
aggacggtggctgcaccatctgtcttcatcttcccgccatctgatgagcagttgaaatctggaactgcctctg
ttgtgtgcctgctgaataacttctatcccagagaggccaaagtacagtggaaggtggataacgccctccaatc
gggtaactcccaggagagtgtcacagagcaggacagcaaggacagcacctacagcctcagcagcaccctgacg
ctgagcaaagcagactacgagaaacacaaagtctacgcctgcgaagtcacccatcagggcctgagctcgcccg
tcacaaagagcttcaacaggggagagtgttag
(amino acids)
(SEQ ID NO: 110)
[sequence omitted]
Humanized E6 lambda light chain sequence:
(DNA)
(SEQ ID NO: 111)
gaaattgtgttgacacagtctccagccaccctgtctttgtctccaggggaaagagccaccctcacctgcagcg
ccaccagcagtgttagctacatccactggtaccaacagaggcctggccagagccccaggctcctcatctatag
cacctccaacctggccagcggcatcccagccaggttcagtggcagtgggtctgggagcgactacactctcacc
atcagcagcctagagcctgaagattttgcagtttattactgtcagcagcgtagcagctcccctttcacctttg
gcagcggcaccaaagtggaaattaaaggtcagcccaaggctgccccctcggtcactctgttcccgccctcctc
tgaggagcttcaagccaacaaggccacactggtgtgtctcataagtgacttctacccgggagccgtgacagtg
gcctggaaggcagatagcagccccgtcaaggcgggagtggagaccaccacaccctccaaacaaagcaacaaca
agtacgcggccagcagctatctgagcctgacgcctgagcagtggaagtcccacagaagctacagctgccaggt
cacgcatgaagggagcaccgtggagaagacagtggcccctacagaatgttcatagtaa
(amino acids)
(SEQ ID NO: 112)
EIVLTQSPATLSLSPGERATLTCSATSSVSYIHWYQQRPGQSPRLLIYSTSNLASGIPARFSGSGSGSDYTLT
ISSLEPEDFAVYYCQQRSSSPFTFGSGTKVEIKGQPKAAPSVTLFPPSSEELQANKATLVCLISDFYPGAVTV
AWKADSSPVKAGVETTTPSKQSNNKYAASSYLSLTPEQWKSHRSYSCQVTHEGSTVEKTVAPTECS**
Humanized lambda light chain constant region sequence:
(DNA)
(SEQ ID NO: 113)
ggtcagcccaaggctgccccctcggtcactctgttcccgccctcctctgaggagcttcaagccaacaaggcca
cactggtgtgtctcataagtgacttctacccgggagccgtgacagtggcctggaaggcagatagcagccccgt
caaggcgggagtggagaccaccacaccctccaaacaaagcaacaacaagtacgcggccagcagctatctgagc
ctgacgcctgagcagtggaagtcccacagaagctacagctgccaggtcacgcatgaagggagcaccgtggaga
agacagtggcccctacagaatgttcatagtaa
(amino acids)
(SEQ ID NO: 114)
GQPKAAPSVTLFPPSSEELQANKATLVCLISDFYPGAVTVAWKADSSPVKAGVETTTPSKQSNNKYAASSYLS
LTPEQWKSHRSYSCQVTHEGSTVEKTVAPTECS**
Human lambda light chain constant region gBLOCK#3 sequence:
(DNA)
(SEQ ID NO: 115)
agcgccaccagcagtgttagctacatccactggtaccaacagaggcctggccagagccccaggctcctcatct
atagcacctccaacctggccagcggcatcccagccaggttcagtggcagtgggtctgggagcgactacactct
caccatcagcagcctagagcctgaagattttgcagtttattactgtcagcagcgtagcagctcccctttcacc
tttggcagcggcaccaaagtggaaattaaaggtcagcccaaggctgccccctcggtcactctgttcccgccct
cctctgaggagcttcaagccaacaaggccacactggtgtgtctcataagtgacttctacccgggagccgtgac
agtggcctggaaggcagatagcagccccgtcaaggcgggagtggagaccaccacaccctccaaacaaagcaac
aacaagtacgcggccagcagctatctgagcctgacgcctgagcagtggaagtcccacagaagctacagctgcc
aggtcacgcatgaagggagcaccgtggagaagacagtggcccctacagaatgttcatagtaagtttaaacccg
ctgatcagcctcgactgtgccttctagttg
E6 light chain variable region overlapping sequence:
(DNA)
(SEQ ID NO: 116)
agcgccaccagcagtgttagctacatccact
pCDNA3.1 V5 and pSECTag2 overlapping sequence:
(DNA)
(SEQ ID NO: 117)
ccgctgatcagcctcgactgtgccttctagttg
Mouse C2 heavy chain variable region sequence:
(DNA)
(SEQ ID NO: 118)
gaggtccagctggaggagtcagggggaggcttagtgaagcctggagggtccctgaaactctcctgtgcagcct
ctggattcactttcagtggctatgccatgtcttgggttcgccagactccggagaagaggctggagtgggtcgc
aaccattagtagtggtggtacttatatctactatccagacagtgtgaaggggcgattcaccatctccagagac
aatgccaagaacaccctgtacctgcaaatgagcagtctgaggtctgaggacacggccatgtattactgtgcaa
gacttgggggggataattactacgaatacttcgatgtctggggcgcagggaccacggtcaccgtctcctccgc
caaaacgacacccccatctgtctat
(amino acids)
(SEQ ID NO: 119)
EVQLEESGGGLVKPGGSLKLSCAASGFTFSGYAMSWVRQTPEKRLEWVATISSGGTYIYYPDSVKGRFTISRD
NAKNTLYLQMSSLRSEDTAMYYCARLGGDNYYEYFDVWGAGTTVTVSSAKTTPPSVY
Mouse C2 heavy chain variable framework region 1 (FWR1) sequence:
(DNA)
(SEQ ID NO: 120)
gaggtccagctggaggagtcagggggaggcttagtgaagcctggagggtccctgaaactctcctgtgcagcct
ctggattcactttcagt
(amino acids)
(SEQ ID NO: 121)
EVQLEESGGGLVKPGGSLKLSCAASGFTFS
Mouse C2 heavy chain variable complementarity determining regions 1
(CDR1) sequence:
(DNA)
(SEQ ID NO: 122)
ggctatgccatgtct
(amino acids)
(SEQ ID NO: 123)
GYAMS
Mouse C2 heavy chain variable framework region 2 (FWR2) sequence:
(DNA)
(SEQ ID NO: 124)
tgggttcgccagactccggagaagaggctggagtgggtcgca
(amino acids)
(SEQ ID NO: 125)
WVRQTPEKRLEWVA
Mouse C2 heavy chain variable complementarity determining regions 2
(CDR2) sequence:
(DNA)
(SEQ ID NO: 126)
accattagtagtggtggtacttatatctactatccagacagtgtgaagggg
(amino acids)
(SEQ ID NO: 127)
TISSGGTYIYYPDSVKG
Mouse C2 heavy chain variable framework region 3 (FWR3) sequence:
(DNA)
(SEQ ID NO: 128)
cgattcaccatctccagagacaatgccaagaacaccctgtacctgcaaatgagcagtctgaggtctgaggaca
cggccatgtattactgtgcaaga
(amino acids)
(SEQ ID NO: 129)
RFTISRDNAKNTLYLQMSSLRSEDTAMYYCAR
Mouse C2 heavy chain variable complementarity determining regions 3
(CDR3) sequence:
(DNA)
(SEQ ID NO: 130)
cttgggggggataattactacgaatacttcgatgtc
(amino acids)
(SEQ ID NO: 131)
LGGDNYYEYFDV
IGHV3-21*04 heavy chain variable region sequence:
(DNA)
(SEQ ID NO: 132)
gaggtgcagctggtggagtctgggggaggcctggtcaagcctggggggtccctgagactctcctgtgcagcct
ctggattcaccttcagtagctatagcatgaactgggtccgccaggctccagggaaggggctggagtgggtctc
atccattagtagtagtagtagttacatatactacgcagactcagtgaagggccgattcaccatctccagagac
aacgccaagaactcactgtatctgcaaatgaacagcctgagagccgaggacacggccgtgtattactgtgcga
ga
(amino acids)
(SEQ ID NO: 133)
EVQLVESGGGLVKPGGSLRLSCAASGFTFSSYSMNWVRQAPGKGLEWVSSISSSSSYIYYADSVKGRFTISRD
NAKNSLYLQMNSLRAEDTAVYYCAR
IGHV3-21*04 heavy chain variable framework region 1 (FWR1) sequence:
(DNA)
(SEQ ID NO: 134)
gaggtgcagctggtggagtctgggggaggcctggtcaagcctggggggtccctgagactctcctgtgcagcct
ctggattcaccttcagt
(amino acids)
(SEQ ID NO: 135)
EVQLVESGGGLVKPGGSLRLSCAASGFTFS
IGHV3-21*04 heavy chain variable complementarity determining regions 1
(CDR1) sequence:
(DNA)
(SEQ ID NO: 136)
agctatagcatgaac
(amino acids)
(SEQ ID NO: 137)
SYSMN
IGHV3-21*04 heavy chain variable framework region 2 (FWR2) sequence:
(DNA)
(SEQ ID NO: 138)
gggtccgccaggctccagggaaggggctggagtgggtctca
(amino acids)
(SEQ ID NO: 139)
WVRQAPGKGLEWVS
IGHV3-21*04 heavy chain variable complementarity determining regions 2
(CDR2) sequence:
(DNA)
(SEQ ID NO: 140)
tccattagtagtagtagtagttacatatactacgcagactcagtgaagggc
(amino acids)
(SEQ ID NO: 141)
SISSSSSYIYYADSVKG
IGHV3-21*04 heavy chain variable framework region 3 (FWR3) sequence:
(DNA)
(SEQ ID NO: 142)
cgattcaccatctccagagacaacgccaagaactcactgtatctgcaaatgaacagcctgagagccgaggaca
cggccgtgtattactgtgcgaga
(amino acids)
(SEQ ID NO: 143)
RFTISRDNAKNSLYLQMNSLRAEDTAVYYCAR
Humanized C2 heavy chain variable region sequence:
(DNA)
(SEQ ID NO: 144)
gaggtgcagctggtggagtctgggggaggcctggtcaagcctggggggtccctgagactctcctgtgcagcct
ctggattcaccttcagtggctatgccatgagctgggtccgccaggctccagggaaggggctggagtgggtctc
aaccattagtagtggcggaacctacatatactaccccgactcagtgaagggccgattcaccatctccagagac
aacgccaagaactcactgtatctgcaaatgaacagcctgagagccgaggacacggccgtgtattactgtgcga
gacttgggggggataattactacgaatacttcgatgtctggggcaaagggaccacggtcaccgtctcctcc
(amino acids)
(SEQ ID NO: 145)
EVQLVESGGGLVKPGGSLRLSCAASGFTFSGYAMSWVRQAPGKGLEWVSTISSGGTYIYYPDSVKGRFTISRD
NAKNSLYLQMNSLRAEDTAVYYCARLGGDNYYEYFDVWGKGTTVTVSS
Humanized C2 heavy chain variable framework region 1 (FWR1) sequence:
(DNA)
(SEQ ID NO: 146)
gaggtgcagctggtggagtctgggggaggcctggtcaagcctggggggtccctgagactctcctgtgcagcct
ctggattcaccttcagt
(amino acids)
(SEQ ID NO: 147)
EVQLVESGGGLVKPGGSLRLSCAASGFTFS
Humanized C2 heavy chain variable complementarity determining regions 1
(CDR1) sequence:
(DNA)
(SEQ ID NO: 148)
ggctatgccatgagc
(amino acids)
(SEQ ID NO: 149)
GYAMS
Humanized C2 heavy chain variable framework region 2 (FWR2) sequence:
(DNA)
(SEQ ID NO: 150)
tgggtccgccaggctccagggaaggggctggagtgggtctcaa
(amino acids)
(SEQ ID NO: 151)
WVRQAPGKGLEWVS
Humanized C2 heavy chain variable complementarity determining regions 2
(CDR2) sequence:
(DNA)
(SEQ ID NO: 152)
accattagtagtggcggaacctacatatactaccccgactcagtgaagggc
(amino acids)
(SEQ ID NO: 153)
TISSGGTYIYYPDSVKG
Humanized C2 heavy chain variable framework region 3 (FWR3) sequence:
(DNA)
(SEQ ID NO: 154)
cgattcaccatctccagagacaacgccaagaactcactgtatctgcaaatgaacagcctgagagccgaggaca
cggccgtgtattactgtgcgaga
(amino acids)
(SEQ ID NO: 155)
RFTISRDNAKNSLYLQMNSLRAEDTAVYYCAR
Humanized C2 heavy chain variable complementarity determining regions 3
(CDR3) sequence:
(DNA)
(SEQ ID NO: 156)
cttgggggggataattactacgaatacttcgatgtc
(amino acids)
(SEQ ID NO: 157)
LGGDNYYEYFDV
Humanized C2 IgG1 heavy chain sequence
(DNA)
(SEQ ID NO: 157)
gaggtgcagctggtggagtctgggggaggcctggtcaagcctggggggtccctgagactctcctgtgcagcct
ctggattcaccttcagtggctatgccatgagctgggtccgccaggctccagggaaggggctggagtgggtctc
aaccattagtagtggcggaacctacatatactaccccgactcagtgaagggccgattcaccatctccagagac
aacgccaagaactcactgtatctgcaaatgaacagcctgagagccgaggacacggccgtgtattactgtgcga
gacttgggggggataattactacgaatacttcgatgtctggggcaaagggaccacggtcaccgtctcctccgc
tagcaccaagggcccatcggtcttccccctggcaccctcctccaagagcacctctgggggcacagcggccctg
ggctgcctggtcaaggactacttccccgaaccggtgacggtgtcgtggaactcaggcgccctgaccagcggcg
tgcacaccttcccggctgtcctacagtcctcaggactctactccctcagcagcgtggtgacagtgccctccag
cagcttgggcacccagacctacatctgcaacgtgaatcacaagcccagcaacaccaaggtggacaagaaagtt
gagcccaaatcttgtgacaaaactcacacatgcccaccgtgcccagcacctgaactcctggggggaccgtcag
tcttcctcttccccccaaaacccaaggacaccctcatgatctcccggacccctgaggtcacatgcgtggtggt
ggacgtgagccacgaagaccctgaggtcaagttcaactggtacgtggacggcgtggaggtgcataatgccaag
acaaagccgcgggaggagcagtacaacagcacgtaccgtgtggtcagcgtcctcaccgtcctgcaccaggact
ggctgaatggcaaggagtacaagtgcaaggtctccaacaaagccctcccagcccccatcgagaaaaccatctc
caaagccaaagggcagccccgagaaccacaggtgtacaccctgcccccatcccgggaggagatgaccaagaac
caggtcagcctgacctgcctggtcaaaggcttctatcccagcgacatcgccgtggagtgggagagcaatgggc
agccggagaacaactacaagaccacgcctcccgtgctggactccgacggctccttcttcctctacagcaagct
caccgtggacaagagcaggtggcagcaggggaacgtcttctcatgctccgtgatgcatgaggctctgcacaac
cactacacgcagaagagcctctccctgtctccgggtaaatgataa
(amino acids)
(SEQ ID NO: 158)
EVQLVESGGGLVKPGGSLRLSCAASGFTFSGYAMSWVRQAPGKGLEWVSTISSGGTYIYYPDSVKGRFTISRD
NAKNSLYLQMNSLRAEDTAVYYCARLGGDNYYEYFDVWGKGTTVTVSSASTKGPSVFPLAPSSKSTSGGTAAL
GCLVKDYFPEPVTVSWNSGALTSGVHTFPAVLQSSGLYSLSSVVTVPSSSLGTQTYICNVNHKPSNTKVDKKV
EPKSCDKTHTCPPCPAPELLGGPSVFLFPPKPKDTLMISRTPEVTCVVVDVSHEDPEVKFNWYVDGVEVHNAK
TKPREEQYNSTYRVVSVLTVLHQDWLNGKEYKCKVSNKALPAPIEKTISKAKGQPREPQVYTLPPSREEMTKN
QVSLTCLVKGFYPSDIAVEWESNGQPENNYKTTPPVLDSDGSFFLYSKLTVDKSRWQQGNVFSCSVMHEALHN
HYTQKSLSLSPGK**
Humanized C2 gBLOCK#4 sequence:
(DNA)
(SEQ ID NO: 160)
actcactatagggagacccaagctggctagttaagcttgggccaccatggagacagacacactcctgctatgg
gtactgctgctctgggttccaggttccactggtgacgaggtgcagctggtggagtctgggggaggcctggtca
agcctggggggtccctgagactctcctgtgcagcctctggattcaccttcagtggctatgccatgagctgggt
ccgccaggctccagggaaggggctggagtgggtctcaaccattagtagtggcggaacctacatatactacccc
gactcagtgaagggccgattcaccatctccagagacaacgccaagaactcactgtatctgcaaatgaacagcc
tgagagccgaggacacggccgtgtattactgtgcgagacttgggggggataattactacgaatacttcgatgt
ctggggcaaagggaccacggtcaccgtctcctccgctagcaccaagggcccatcggtcttccccctggcaccc
tcctccaagagcacctctgggggcacagcggccctgggctgcctggtcaaggactacttccccgaaccggtga
cggtgtcgtggaactcaggcgccctgaccagc
pCDNA3.1 V5 overlapping sequence:
(DNA)
(SEQ ID NO: 161)
actcactatagggagacccaagctggctagtt
Human IgG1 constant region overlapping sequence:
(DNA)
(SEQ ID NO: 162)
gacggtgtcgtggaactcaggcgccctgaccagc
Humanized C2 IgG2 heavy chain sequence
(DNA)
(SEQ ID NO: 163)
gaggtgcagctggtggagtctgggggaggcctggtcaagcctggggggtccctgagactctcctgtgcagcct
ctggattcaccttcagtggctatgccatgagctgggtccgccaggctccagggaaggggctggagtgggtctc
aaccattagtagtggcggaacctacatatactaccccgactcagtgaagggccgattcaccatctccagagac
aacgccaagaactcactgtatctgcaaatgaacagcctgagagccgaggacacggccgtgtattactgtgcga
gacttgggggggataattactacgaatacttcgatgtctggggcaaagggaccacggtcaccgtctcctccgc
ctccaccaagggcccatcggtcttccccctggcgccctgctccaggagcacctccgagagcacagccgccctg
ggctgcctggtcaaggactacttccccgaaccggtgacggtgtcgtggaactcaggcgctctgaccagcggcg
tgcacaccttcccagctgtcctacagtcctcaggactctactccctcagcagcgtggtgaccgtgccctccag
caacttcggcacccagacctacacctgcaacgtagatcacaagcccagcaacaccaaggtggacaagacagtt
gagcgcaaatgttgtgtcgagtgcccaccgtgcccagcaccacctgtggcaggaccgtcagtcttcctcttcc
ccccaaaacccaaggacaccctcatgatctcccggacccctgaggtcacgtgcgtggtggtggacgtgagcca
cgaagaccccgaggtccagttcaactggtacgtggacggcgtggaggtgcataatgccaagacaaagccacgg
gaggagcagttcaacagcacgttccgtgtggtcagcgtcctcaccgttgtgcaccaggactggctgaacggca
aggagtacaagtgcaaggtctccaacaaaggcctcccagcccccatcgagaaaaccatctccaaaaccaaagg
gcagccccgagaaccacaggtgtacaccctgcccccatcccgggaggagatgaccaagaaccaggtcagcctg
acctgcctggtcaaaggcttctaccccagcgacatcgccgtggagtgggagagcaatgggcagccggagaaca
actacaagaccacacctcccatgctggactccgacggctccttcttcctctacagcaagctcaccgtggacaa
gagcaggtggcagcaggggaacgtcttctcatgctccgtgatgcatgaggctctgcacaaccactacacgcag
aagagcctctccctgtctccgggtaaatagtaa
(amino acids)
(SEQ ID NO: 164)
EVQLVESGGGLVKPGGSLRLSCAASGFTFSGYAMSWVRQAPGKGLEWVSTISSGGTYIYYPDSVKGRFTISRD
NAKNSLYLQMNSLRAEDTAVYYCARLGGDNYYEYFDVWGKGTTVTVSSASTKGPSVFPLAPCSRSTSESTAAL
GCLVKDYFPEPVTVSWNSGALTSGVHTFPAVLQSSGLYSLSSVVTVPSSNFGTQTYTCNVDHKPSNTKVDKTV
ERKCCVECPPCPAPPVAGPSVFLFPPKPKDTLMISRTPEVTCVVVDVSHEDPEVQFNWYVDGVEVHNAKTKPR
EEQFNSTFRVVSVLTVVHQDWLNGKEYKCKVSNKGLPAPIEKTISKTKGQPREPQVYTLPPSREEMTKNQVSL
TCLVKGFYPSDIAVEWESNGQPENNYKTTPPMLDSDGSFFLYSKLTVDKSRWQQGNVFSCSVMHEALHNHYTQ
KSLSLSPGK**
Humanized C2 gBLOCK#5 sequence:
(DNA)
(SEQ ID NO: 165)
tgctctgggttccaggttccactggtgacgcggcccagccggccgaggtgcagctggtggagtctgggggagg
cctggtcaagcctggggggtccctgagactctcctgtgcagcctctggattcaccttcagtggctatgccatg
agctgggtccgccaggctccagggaaggggctggagtgggtctcaaccattagtagtggcggaacctacatat
actaccccgactcagtgaagggccgattcaccatctccagagacaacgccaagaactcactgtatctgcaaat
gaacagcctgagagccgaggacacggccgtgtattactgtgcgagacttgggggggataattactacgaatac
ttcgatgtctggggcaaagggaccacggtcaccgtctcctccgcctccaccaagggcccatcggtcttccccc
tggcgccctgctccaggagcacctccgagagcacagccgccctgggctgcctggtcaaggactacttccccga
accggtgacggtgtcgtggaactcaggcgctctgacca
pSEC Tag2 overlapping sequence:
(DNA)
(SEQ ID NO: 166)
tgctctgggttccaggttccactggtgacgc
Human IgG2 constant region overlapping sequence:
(DNA)
(SEQ ID NO: 167)
gacggtgtcgtggaactcaggcgctctgacca
Mouse C2 light chain variable region sequence:
(DNA)
(SEQ ID NO: 168)
gacattgtgatcacacagtctacagcttccttaggtgtatctctggggcagagggccaccatctcatgcaggg
ccagcaaaagtgtcagtacatctggctatagttatatgcactggtaccaacagagaccaggacagccacccaa
actcctcatctatcttgcatccaacctagaatctggggtccctgccaggttcagtggcagtgggtctgggaca
gacttcaccctcaacatccatcctgtggaggaggaggatgctgcaacctattactgtcagcacagtagggagc
ttccgttcacgttcggaggggggaccaagctggagataaaacgggctgatgctgcaccaactgtatcc
(amino acids)
(SEQ ID NO: 169)
DIVITQSTASLGVSLGQRATISCRASKSVSTSGYSYMHWYQQRPGQPPKLLIYLASNLESGVPARFSGSGSGT
DFTLNIHPVEEEDAATYYCQHSRELPFTFGGGTKLEIKRADAAPTVS
Mouse C2 light chain variable framework region 1 (FWR1) sequence:
(DNA)
(SEQ ID NO: 170)
gacattgtgatcacacagtctacagcttccttaggtgtatctctggggcagagggccaccatctcatgc
(amino acids)
(SEQ ID NO: 171)
DIVITQSTASLGVSLGQRATISC
Mouse C2 light chain variable complementarity determining regions 1
(CDR1) sequence:
(DNA)
(SEQ ID NO: 172)
agggccagcaaaagtgtcagtacatctggctatagttatatgcac
(amino acids)
(SEQ ID NO: 173)
RASKSVSTSGYSYMH
Mouse C2 light chain variable framework region 2 (FWR2) sequence:
(DNA)
(SEQ ID NO: 174)
tggtaccaacagagaccaggacagccacccaaactcctcatctat
(amino acids)
(SEQ ID NO: 175)
WYQQRPGQPPKLLIY
Mouse C2 light chain variable complementarity determining regions 2
(CDR2) sequence:
(DNA)
(SEQ ID NO: 176)
cttgcatccaacctagaatc
(amino acids)
(SEQ ID NO: 177)
LASNLES
Mouse C2 light chain variable framework region 3 (FWR3) sequence:
(DNA)
(SEQ ID NO: 178)
tggggtccctgccaggttcagtggcagtgggtctgggacagacttcaccctcaacatccatcctgtggaggag
gaggatgctgcaacctattactgt
(amino acids)
(SEQ ID NO: 179)
GVPARFSGSGSGTDFTLNIHPVEEEDAATYYC
Mouse C2 light chain variable complementarity determining regions 3
(CDR3) sequence:
(DNA)
(SEQ ID NO: 180)
cagcacagtagggagcttccgttcacg
(amino acids)
(SEQ ID NO: 181)
QHSRELPFT
IGKV7-3*01 light chain variable region sequence:
(DNA)
(SEQ ID NO: 182)
gacattgtgctgacccagtctccagcctccttggccgtgtctccaggacagagggccaccatcacctgcagag
ccagtgagagtgtcagtttcttgggaataaacttaattcactggtatcagcagaaaccaggacaacctcctaa
actcctgatttaccaagcatccaataaagacactggggtcccagccaggttcagcggcagtgggtctgggacc
gatttcaccctcacaattaatcctgtggaagctaatgatactgcaaattattactgtctgcagagtaagaatt
ttcctcccaca
(amino acid)
(SEQ ID NO: 183)
DIVLTQSPASLAVSPGQRATITCRASESVSFLGINLIHWYQQKPGQPPKLLIYQASNKDTGVPARFSGSGSGT
DFTLTINPVEANDTANYYCLQSKNFPPT
IGKV7-3*01 light chain variable framework region 1 (FWR1) sequence:
(DNA)
(SEQ ID NO:184)
gacattgtgctgacccagtctccagcctccttggccgtgtctccaggacagagggccaccatcacctgc
(amino acids)
(SEQ ID NO: 185)
DIVLTQSPASLAVSPGQRATITC
IGKV7-3*01 light chain variable complementarity determining regions 1
(CDR1) sequence:
(DNA)
(SEQ ID NO: 186)
agagccagtgagagtgtcagtttcttgggaataaacttaattcac
(amino acids)
(SEQ ID NO:187)
RASESVSFLGINLIH
IGKV7-3*01 light chain variable framework region 2 (FWR2) sequence:
(DNA)
(SEQ ID NO: 188)
tggtatcagcagaaaccaggacaacctcctaaactcctgatttac
(amino acids)
(SEQ ID NO: 189)
WYQQKPGQPPKLLIY
IGKV7-3*01 light chain variable complementarity determining regions 2
(CDR2) sequence:
(DNA)
(SEQ ID NO: 190)
caagcatccaataaagacact
(amino acids)
(SEQ ID NO: 191)
QASNKDT
IGKV7-3*01 light chain variable framework region 3 (FWR3) sequence:
(DNA)
(SEQ ID NO: 192)
ggggtcccagccaggttcagcggcagtgggtctgggaccgatttcaccctcacaattaatcctgtggaagcta
atgatactgcaaattattactgt
(amino acids)
(SEQ ID NO: 193)
GVPARFSGSGSGTDFTLTINPVEANDTANYYC
Humanized C2 light chain variable region sequence:
(DNA)
(SEQ ID NO: 194)
gacattgtgctgacccagtctccagcctccttggccgtgtctccaggacagagggccaccatcacctgcagag
ccagtaagagtgtcagtaccagcggatactcctacatgcactggtatcagcagaaaccaggacaacctcctaa
actcctgatttacctggcatccaatctggagagcggggtcccagccaggttcagcggcagtgggtctgggacc
gatttcaccctcacaattaatcctgtggaagctaatgatactgcaaattattactgtcagcacagtagggagc
tgcctttcacattcggcggagggaccaaggtggagatcaaacgaact
(amino acids)
(SEQ ID NO: 195)
DIVLTQSPASLAVSPGQRATITCRASKSVSTSGYSYMHWYQQKPGQPPKLLIYLASNLESGVPARFSGSGSGT
DFTLTINPVEANDTANYYCQHSRELPFTFGGGTKVEIKRT
Humanized C2 light chain variable framework region 1 (FWR1) acid
sequence:
(DNA)
(SEQ ID NO: 196)
gacattgtgctgacccagtctccagcctccttggccgtgtctccaggacagagggccaccatcacctgc
(amino acids)
(SEQ ID NO: 197)
DIVLTQSPASLAVSPGQRATITC
Humanized C2 light chain variable complementarity determining regions 1
(CDR1) sequence:
(DNA)
(SEQ ID NO: 198)
agagccagtaagagtgtcagtaccagcggatactcctacatgcac
(amino acids)
(SEQ ID NO: 199)
RASKSVSTSGYSYMH
Humanized C2 heavy light variable framework region 2 (FWR2) acid
sequence:
(DNA)
(SEQ ID NO: 200)
tggtatcagcagaaaccaggacaacctcctaaactcctgatttac
(amino acids)
(SEQ ID NO: 201)
WYQQKPGQPPKLLIY
Humanized C2 light chain variable complementarity determining regions 2
(CDR2) sequence:
(DNA)
(SEQ ID NO: 202)
ctggcatccaatctggagagc
(amino acids)
(SEQ ID NO: 203)
LASNLES
Humanized C2 light chain variable framework region 3 (FWR3) acid
sequence:
(DNA)
(SEQ ID NO: 204)
ggggtcccagccaggttcagcggcagtgggtctgggaccgatttcaccctcacaattaatcctgtggaagcta
atgatactgcaaattattactgt
(amino acids)
(SEQ ID NO: 205)
GVPARFSGSGSGTDFTLTINPVEANDTANYYC
Humanized C2 light chain variable complementarity determining regions 3
(CDR3) sequence:
(DNA)
(SEQ ID NO: 206)
cagcacagtagggagctgcctttcaca
(amino acids)
(SEQ ID NO: 207)
QHSRELPFT
Humanized C2 light chain variable complementarity determining regions 3
(CDR3) sequence:
(DNA)
(SEQ ID NO: 208)
ctgcagagtaagaattttcctcccaca
(amino acids)
(SEQ ID NO: 209)
LQSKNFPPT
Humanized C2 gBLOCK#6 sequence (Kappa light chain in pCDNA3.1 V5):
(DNA)
(SEQ ID NO: 210)
actcactatagggagacccaagctggctagttaagcttgggccaccatggagacagacacactcctgctatgg
gtactgctgctctgggttccaggttccactggtgacgacattgtgctgacccagtctccagcctccttggccg
tgtctccaggacagagggccaccatcacctgcagagccagtaagagtgtcagtaccagcggatactcctacat
gcactggtatcagcagaaaccaggacaacctcctaaactcctgatttacctggcatccaatctggagagcggg
gtcccagccaggttcagcggcagtgggtctgggaccgatttcaccctcacaattaatcctgtggaagctaatg
atactgcaaattattactgtcagcacagtagggagctgcctttcacattcggcggagggaccaaggtggagat
caaacgaactacggtggctgcaccatctgtcttcatcttcccgccatctgatgagcagttgaaatctggaact
gcctctgttgtgtgcctgctgaataacttctatcccagagaggccaaagtacagtggaaggtggataacgccc
tccaatcgggtaactcccaggagagtgtcacagagcaggacagcaaggacagcacctacagcctcagcagcac
cctgacgctgagcaaagcagactacgagaaacacaaagtctacgcctgcgaagtcacccatcagggcctgagc
tcgcccgtcacaaagagcttcaacaggggagagtgttagtaagtttaaacccgctgatcagcctcgactgtgc
cttctagttg
pCDNA3.1 V5 5′ overlapping sequence:
(DNA)
(SEQ ID NO: 211)
actcactatagggagacccaagctggctagtt
pCDNA3.1 V5 3′ overlapping sequence:
(DNA)
(SEQ ID NO: 212)
ccgctgatcagcctcgactgtgccttctagttg
Humanized C2 gBLOCK#7 sequence (Kappa light chain in pSEC Tag2):
(DNA)
(SEQ ID NO: 213)
tgctctgggttccaggttccactggtgacgcggcccagccggccgacattgtgctgacccagtctccagcctc
cttggccgtgtctccaggacagagggccaccatcacctgcagagccagtaagagtgtcagtaccagcggatac
tcctacatgcactggtatcagcagaaaccaggacaacctcctaaactcctgatttacctggcatccaatctgg
agagcggggtcccagccaggttcagcggcagtgggtctgggaccgatttcaccctcacaattaatcctgtgga
agctaatgatactgcaaattattactgtcagcacagtagggagctgcctttcacattcggcggagggaccaag
gtggagatcaaacgaactacggtggctgcaccatctgtcttcatcttcccgccatctgatgagcagttgaaat
ctggaactgcctctgttgtgtgcctgctgaataacttctatcccagagaggccaaagtacagtggaaggtgga
taacgccctccaatcgggtaactcccaggagagtgtcacagagcaggacagcaaggacagcacctacagcctc
agcagcaccctgacgctgagcaaagcagactacgagaaacacaaagtctacgcctgcgaagtcacccatcagg
gcctgagctcgcccgtcacaaagagcttcaacaggggagagtgttagtaagtttaaacccgctgatcagcctc
gactgtgccttctagttg
pSEC Tag2 5′ overlapping sequence:
(DNA)
(SEQ ID NO: 214)
tgctctgggttccaggttccactggtgacgc
pSEC Tag2 3′ overlapping sequence:
(DNA)
(SEQ ID NO: 215)
ccgctgatcagcctcgactgtgccttctagttg
Humanized C2 gBLOCK#8 sequence (lambda light chain in pCDNA3.1 V5):
(DNA)
(SEQ ID NO: 216)
actcactatagggagacccaagctggctagttaagcttgggccaccatggagacagacacactcctgctatgg
gtactgctgctctgggttccaggttccactggtgacgacattgtgctgacccagtctccagcctccttggccg
tgtctccaggacagagggccaccatcacctgcagagccagtaagagtgtcagtaccagcggatactcctacat
gcactggtatcagcagaaaccaggacaacctcctaaactcctgatttacctggcatccaatctggagagcggg
gtcccagccaggttcagcggcagtgggtctgggaccgatttcaccctcacaattaatcctgtggaagctaatg
atactgcaaattattactgtcagcacagtagggagctgcctttcacattcggcggagggaccaaggtggagat
caaacgaactggtcagcccaaggctgccccctcggtcactctgttcccgccctcctctgaggagcttcaagcc
aacaaggccacactggtgtgtctcataagtgacttctacccgggagccgtgacagtggcctggaaggcagata
gcagccccgtcaaggcgggagtggagaccaccacaccctccaaacaaagcaacaacaagtacgcggccagcag
ctatctgagcctgacgcctgagcagtggaagtcccacagaagctacagctgccaggtcacgcatgaagggagc
accgtggagaagacagtggcccctacagaatgttcatagtaagtttaaacccgctgatcagcctcgactgtgc
cttctagttg
pCDNA3.1 V5 5′ overlapping sequence:
(DNA)
(SEQ ID NO: 217)
actcactatagggagacccaagctggctagtt
pCDNA3.1 V5 3′ overlapping sequence:
(DNA)
(SEQ ID NO: 218)
ccgctgatcagcctcgactgtgccttctagttg
Humanized C2 gBLOCK#9 sequence (lambda light chain in pSEC Tag2):
(DNA)
(SEQ ID NO: 219)
tgctctgggttccaggttccactggtgacgcggcccagccggccgacattgtgctgacccagtctccagcctc
cttggccgtgtctccaggacagagggccaccatcacctgcagagccagtaagagtgtcagtaccagcggatac
tcctacatgcactggtatcagcagaaaccaggacaacctcctaaactcctgatttacctggcatccaatctgg
agagcggggtcccagccaggttcagcggcagtgggtctgggaccgatttcaccctcacaattaatcctgtgga
agctaatgatactgcaaattattactgtcagcacagtagggagctgcctttcacattcggcggagggaccaag
gtggagatcaaacgaactggtcagcccaaggctgccccctcggtcactctgttcccgccctcctctgaggagc
ttcaagccaacaaggccacactggtgtgtctcataagtgacttctacccgggagccgtgacagtggcctggaa
ggcagatagcagccccgtcaaggcgggagtggagaccaccacaccctccaaacaaagcaacaacaagtacgcg
gccagcagctatctgagcctgacgcctgagcagtggaagtcccacagaagctacagctgccaggtcacgcatg
aagggagcaccgtggagaagacagtggcccctacagaatgttcatagtaagtttaaacccgctgatcagcctc
gactgtgccttctagttg
pSEC Tag2 5′ overlapping sequence:
(DNA)
(SEQ ID NO: 220)
tgctctgggttccaggttccactggtgacgc
pSEC Tag2 3′ overlapping sequence:
(DNA)
(SEQ ID NO: 221)
ccgctgatcagcctcgactgtgccttctagttg
Murine Ig kappa chain leader sequence
(DNA)
(SEQ ID NO: 222)
atggagacagacacactcctgctatgggtactgctgctctgggttccaggttccactggtgac
(amino acids)
(SEQ ID NO: 223)
METDTLLLWVLLLWVPGSTGD
Interleukin-2 (IL-2) leader sequence
(DNA)
(SEQ ID NO: 224)
atgtacaggatgcaactcctgtcttgcattgcactaagtcttgcacttgtcacaaacagt
(amino acids)
(SEQ ID NO: 225)
MYRMQLLSCIALSLALVTNS
CD33 leader sequence
(DNA)
(SEQ ID NO: 226)
atgcctcttctgcttctgcttcctctgctttgggctggagctcttgct
(amino acids)
(SEQ ID NO: 227)
MPLLLLLPLLWAGALA
IGHV3-21*03 leader sequence
(DNA)
(SEQ ID NO: 228)
atggaactggggctccgctgggttttccttgttgctattttagaaggtgtccagtgt
(amino acids)
(SEQ ID NO: 229)
MELGLRWVFLVAILEGVQC
IGHV3-11*02 leader sequence
(DNA)
(SEQ ID NO: 230)
atggaagccccagcgcagcttctcttcctcctgctactctggctcccagataccactgga
(amino acids)
(SEQ ID NO: 231)
MEAPAQLLFLLLLWLPDTTG
Humanized E6 single chain GS3
(DNA)
(SEQ ID NO: 232)
gaggtgcagctggtggagtctgggggaggcctggtcaagcctggggggtccctgagactctcctgtg
cagcctctggattcaccttcagtaggtatggcatgagctgggtccgccaggctccagggaagaggct
ggagtgggtctcaaccattagtggcggaggcacctacatatactacccagactcagtgaagggccga
ttcaccatctccagagacaacgccaagaacaccctgtatctgcaaatgaacagcctgagagccgagg
acacggctgtgtattactgtaccagagataactatggccgcaactatgattatggcatggattattg
gggccagggcaccctggtgaccgtgagcagcggcggtggcggatccggcggtggcggatccggcggt
ggcggatccgaaattgtgttgacacagtctccagccaccctgtctttgtctccaggggaaagagcca
ccctcacctgcagcgccaccagcagtgttagctacatccactggtaccaacagaggcctggccagag
ccccaggctcctcatctatagcacctccaacctggccagcggcatcccagccaggttcagtggcagt
gggtctgggagcgactacactctcaccatcagcagcctagagcctgaagattttgcagtttattact
gtcagcagcgtagcagctcccctttcacctttggcagcggcaccaaagtggaaattaaa
(amino acids)
(SEQ ID NO: 233)
EVQLVESGGGLVKPGGSLRLSCAASGFIFSRYGMSWVRQAPGKRLEWVSTISGGGIYIYYPDSVKGRFTISRD
NAKNTLYLQMNSLRAEDTAVYYCIRDNYGRNYDYGMDYWGQGTLVIVSSGGGGSGGGGSGGGGSEIVLIQSPA
ILSLSPGERATLICSATSSVSYIHWYQQRPGQSPRLLIYSTSNLASGIPARFSGSGSGSDYILTISSLEPEDF
AVYYCQQRSSSPFTFGSGTKVEIK
Humanized E6 single chain IgGlnoC
(DNA)
(SEQ ID NO: 234)
gaggtgcagctggtggagtctgggggaggcctggtcaagcctggggggtccctgagactctcctgtgcagcct
ctggattcaccttcagtaggtatggcatgagctgggtccgccaggctccagggaagaggctggagtgggtctc
aaccattagtggcggaggcacctacatatactacccagactcagtgaagggccgattcaccatctccagagac
aacgccaagaacaccctgtatctgcaaatgaacagcctgagagccgaggacacggctgtgtattactgtacca
gagataactatggccgcaactatgattatggcatggattattggggccagggcaccctggtgaccgtgagcag
cgataaaacccatactaaaccgccaaaaccggcgccggaactgctgggtggtcctggtaccggtgaaattgtg
ttgacacagtctccagccaccctgtctttgtctccaggggaaagagccaccctcacctgcagcgccaccagca
gtgttagctacatccactggtaccaacagaggcctggccagagccccaggctcctcatctatagcacctccaa
cctggccagcggcatcccagccaggttcagtggcagtgggtctgggagcgactacactctcaccatcagcagc
ctagagcctgaagattttgcagtttattactgtcagcagcgtagcagctcccctttcacctttggcagcggca
ccaaagtggaaattaaa
(amino acids)
(SEQ ID NO: 235)
EVQLVESGGGLVKPGGSLRLSCAASGFTFSRYGMSWVRQAPGKRLEWVSTISGGGTYIYYPDSVKGRFTISRD
NAKNTLYLQMNSLRAEDTAVYYCTRDNYGRNYDYGMDYWGQGTLVTVSSDKTHTKPPKPAPELLGGPGTGEIV
LTQSPATLSLSPGERATLTCSATSSVSYIHWYQQRPGQSPRLLIYSTSNLASGIPARFSGSGSGSDYTLTISS
LEPEDFAVYYCQQRSSSPFTFGSGTKVEIK
Humanized E6 single chain X4 (linker is IgG1 and IgG2 modified hinge
region)
(DNA)
(SEQ ID NO: 236)
gaggtgcagctggtggagtctgggggaggcctggtcaagcctggggggtccctgagactctcctgtgcagcct
ctggattcaccttcagtaggtatggcatgagctgggtccgccaggctccagggaagaggctggagtgggtctc
aaccattagtggcggaggcacctacatatactacccagactcagtgaagggccgattcaccatctccagagac
aacgccaagaacaccctgtatctgcaaatgaacagcctgagagccgaggacacggctgtgtattactgtacca
gagataactatggccgcaactatgattatggcatggattattggggccagggcaccctggtgaccgtgagcag
cgataaaacccatactaaaccgccaaaaccggcgccggaactgctgggtggtcctggtaccggtactggtggt
ccgactattaaacctccgaaacctccgaaacctgctccgaacctgctgggtggtccggaaattgtgttgacac
agtctccagccaccctgtctttgtctccaggggaaagagccaccctcacctgcagcgccaccagcagtgttag
ctacatccactggtaccaacagaggcctggccagagccccaggctcctcatctatagcacctccaacctggcc
agcggcatcccagccaggttcagtggcagtgggtctgggagcgactacactctcaccatcagcagcctagagc
ctgaagattttgcagtttattactgtcagcagcgtagcagctcccctttcacctttggcagcggcaccaaagt
ggaaattaaa
(amino acids)
(SEQ ID NO: 237)
EVQLVESGGGLVKPGGSLRLSCAASGFTFSRYGMSWVRQAPGKRLEWVSTISGGGTYIYYPDSVKGRFTISRD
NAKNTLYLQMNSLRAEDTAVYYCTRDNYGRNYDYGMDYWGQGTLVTVSSDKTHTKPPKPAPELLGGPGTGTGC
PTIKPPKPPKPAPNLLGGPEIVLTQSPATLSLSPGERATLTCSATSSVSYIHWYQQRPGQSPRLLIYSTSNLA
SGIPARFSGSGSGSDYTLTISSLEPEDFAVYYCQQRSSSPFTFGSGTKVEIK
Humanized C2 single chain GS3
(DNA)
(SEQ ID NO: 238)
gaggtgcagctggtggagtctgggggaggcctggtcaagcctggggggtccctgagactctcctgtgcagcct
ctggattcaccttcagtggctatgccatgagctgggtccgccaggctccagggaaggggctggagtgggtctc
aaccattagtagtggcggaacctacatatactaccccgactcagtgaagggccgattcaccatctccagagac
aacgccaagaactcactgtatctgcaaatgaacagcctgagagccgaggacacggccgtgtattactgtgcga
gacttgggggggataattactacgaatacttcgatgtctggggcaaagggaccacggtcaccgtctcctccgg
cggtggcggatccggcggtggcggatccggcggtggcggatccgacattgtgctgacccagtctccagcctcc
ttggccgtgtctccaggacagagggccaccatcacctgcagagccagtaagagtgtcagtaccagcggatact
cctacatgcactggtatcagcagaaaccaggacaacctcctaaactcctgatttacctggcatccaatctgga
gagcggggtcccagccaggttcagcggcagtgggtctgggaccgatttcaccctcacaattaatcctgtggaa
gctaatgatactgcaaattattactgtcagcacagtagggagctgcctttcacattcggcggagggaccaagg
tggagatcaaacgaact
(amino acids)
(SEQ ID NO: 239)
EVQLVESGGGLVKPGGSLRLSCAASGFTFSGYAMSWVRQAPGKGLEWVSTISSGGTYIYYPDSVKGRFTISRD
NAKNSLYLQMNSLRAEDTAVYYCARLGGDNYYEYFDVWGKGTTVTVSSGGGGSGGGGSGGGGSDIVLTQSPAS
LAVSPGQRATITCRASKSVSTSGYSYMHWYQQKPGQPPKLLIYLASNLESGVPARFSGSGSGTDFTLTINPVE
ANDTANYYCQHSRELPFTFGGGTKVEIKRT
Humanized C2 single chain IgG (no Cysteine)
(DNA)
(SEQ ID NO: 240)
gaggtgcagctggtggagtctgggggaggcctggtcaagcctggggggtccctgagactctcctgtgcagcct
ctggattcaccttcagtggctatgccatgagctgggtccgccaggctccagggaaggggctggagtgggtctc
aaccattagtagtggcggaacctacatatactaccccgactcagtgaagggccgattcaccatctccagagac
aacgccaagaactcactgtatctgcaaatgaacagcctgagagccgaggacacggccgtgtattactgtgcga
gacttgggggggataattactacgaatacttcgatgtctggggcaaagggaccacggtcaccgtctcctccga
taaaacccatactaaaccgccaaaaccggcgccggaactgctgggtggtcctggtaccggtgacattgtgctg
acccagtctccagcctccttggccgtgtctccaggacagagggccaccatcacctgcagagccagtaagagtg
tcagtaccagcggatactcctacatgcactggtatcagcagaaaccaggacaacctcctaaactcctgattta
cctggcatccaatctggagagcggggtcccagccaggttcagcggcagtgggtctgggaccgatttcaccctc
acaattaatcctgtggaagctaatgatactgcaaattattactgtcagcacagtagggagctgcctttcacat
tcggcggagggaccaaggtggagatcaaacgaact
(amino acids)
(SEQ ID NO: 241)
EVQLVESGGGLVKPGGSLRLSCAASGFTFSGYAMSWVRQAPGKGLEWVSTISSGGTYIYYPDSVKGRFTISRD
NAKNSLYLQMNSLRAEDTAVYYCARLGGDNYYEYFDVWGKGTTVTVSSDKTHTKPPKPAPELLGGPGTGDIVL
TQSPASLAVSPGQRATITCRASKSVSTSGYSYMHWYQQKPGQPPKLLIYLASNLESGVPARFSGSGSGTDFTL
TINPVEANDTANYYCQHSRELPFTFGGGTKVEIKRT
Humanized C2 single chain X4 (linker is IgG1 and IgG2 modified hinge
region)
(DNA)
(SEQ ID NO: 242)
gaggtgcagctggtggagtctgggggaggcctggtcaagcctggggggtccctgagactctcctgtgcagcct
ctggattcaccttcagtggctatgccatgagctgggtccgccaggctccagggaaggggctggagtgggtctc
aaccattagtagtggcggaacctacatatactaccccgactcagtgaagggccgattcaccatctccagagac
aacgccaagaactcactgtatctgcaaatgaacagcctgagagccgaggacacggccgtgtattactgtgcga
gacttgggggggataattactacgaatacttcgatgtctggggcaaagggaccacggtcaccgtctcctccga
taaaacccatactaaaccgccaaaaccggcgccggaactgctgggtggtcctggtaccggtactggtggtccg
actattaaacctccgaaacctccgaaacctgctccgaacctgctgggtggtccggacattgtgctgacccagt
ctccagcctccttggccgtgtctccaggacagagggccaccatcacctgcagagccagtaagagtgtcagtac
cagcggatactcctacatgcactggtatcagcagaaaccaggacaacctcctaaactcctgatttacctggca
tccaatctggagagcggggtcccagccaggttcagcggcagtgggtctgggaccgatttcaccctcacaatta
atcctgtggaagctaatgatactgcaaattattactgtcagcacagtagggagctgcctttcacattcggcgg
agggaccaaggtggagatcaaacgaact
(amino acids)
(SEQ ID NO: 243)
EVQLVESGGGLVKPGGSLRLSCAASGFTFSGYAMSWVRQAPGKGLEWVSTISSGGTYIYYPDSVKGRFTISRD
NAKNSLYLQMNSLRAEDTAVYYCARLGGDNYYEYFDVWGKGTTVTVSSDKTHTKPPKPAPELLGGPGTGTGGP
TIKPPKPPKPAPNLLGGPDIVLTQSPASLAVSPGQRATITCRASKSVSTSGYSYMHWYQQKPGQPPKLLIYLA
SNLESGVPARFSGSGSGTDFTLTINPVEANDTANYYCQHSRELPFTFGGGTKVEIKRT
Humanized C3 single chain GS3
(DNA)
(SEQ ID NO: 244)
caggttcagctggtgcagtctggagctgaggtgaagaagcctggggcctcagtgaaggtctcctgcaaggctt
ctggttacacctttaccgactacgccatgaactgggtgcgacaggcccctggacaagggcttgagtggatggg
agtgatcagcaccttcagcggtaacacaaacttcaaccagaagttcaagggcagagtcaccatgaccacagac
acatccacgagcacagcctacatggagctgaggagcctgagatctgacgacacggccgtgtattactgtgcga
gaagcgactactacggcccatacttcgactactggggccagggcaccaccctgaccgtgtccagcggcggtgg
cggatccggcggtggcggatccggcggtggcggatccgatattgtgatgacccagactccactctctctgtcc
gtcacccctggacagccggcctccatctcctgcaggtctagtcagaccattgtccatagtaatggaaacacct
atttggagtggtacctgcagaagccaggccagtctccacagctcctgatctataaggtttccaaccggttctc
tggagtgccagataggttcagtggcagcgggtcagggacagatttcacactgaaaatcagccgggtggaggct
gaggatgttggggtttattactgcttccaaggtagccacgtgcctttcaccttcggcggagggaccaaggtgg
agatcaaacgaact
(amino acids)
(SEQ ID NO: 245)
QVQLVQSGAEVKKPGASVKVSCKASGYTFTDYAMNWVRQAPGQGLEWMGVISTFSGNTNFNQKFKGRVTMTTD
TSTSTAYMELRSLRSDDTAVYYCARSDYYGPYFDYWGQGTTLTVSSGGGGSGGGGSGGGGSDIVMTQTPLSLS
VTPGQPASISCRSSQTIVHSNGNTYLEWYLQKPGQSPQLLIYKVSNRFSGVPDRFSGSGSGTDFTLKISRVEA
EDVGVYYCFQGSHVPFTFGGGTKVEIKRT
Humanized C3 single chain IgG1 (no Cysteine)
(DNA)
(SEQ ID NO: 246)
caggttcagctggtgcagtctggagctgaggtgaagaagcctggggcctcagtgaaggtctcctgcaaggctt
ctggttacacctttaccgactacgccatgaactgggtgcgacaggcccctggacaagggcttgagtggatggg
agtgatcagcaccttcagcggtaacacaaacttcaaccagaagttcaagggcagagtcaccatgaccacagac
acatccacgagcacagcctacatggagctgaggagcctgagatctgacgacacggccgtgtattactgtgcga
gaagcgactactacggcccatacttcgactactggggccagggcaccaccctgaccgtgtccagcgataaaac
ccatactaaaccgccaaaaccggcgccggaactgctgggtggtcctggtaccggtgatattgtgatgacccag
actccactctctctgtccgtcacccctggacagccggcctccatctcctgcaggtctagtcagaccattgtcc
atagtaatggaaacacctatttggagtggtacctgcagaagccaggccagtctccacagctcctgatctataa
ggtttccaaccggttctctggagtgccagataggttcagtggcagcgggtcagggacagatttcacactgaaa
atcagccgggtggaggctgaggatgttggggtttattactgcttccaaggtagccacgtgcctttcaccttcg
gcggagggaccaaggtggagatcaaacgaact
(amino acids)
(SEQ ID NO: 247)
QVQLVQSGAEVKKPGASVKVSCKASGYTFTDYAMNWVRQAPGQGLEWMGVISTFSGNTNFNQKFKGRVTMTTD
TSTSTAYMELRSLRSDDTAVYYCARSDYYGPYFDYWGQGTTLTVSSDKTHTKPPKPAPELLGGPGTGDIVMTQ
TPLSLSVTPGQPASISCRSSQTIVHSNGNTYLEWYLQKPGQSPQLLIYKVSNRFSGVPDRFSGSGSGTDFTLK
ISRVEAEDVGVYYCFQGSHVPFTFGGGTKVEIKRT
Humanized C3 single chain X4 (linker is IgG1 and IgG2 modified hinge
region)
(DNA)
(SEQ ID NO: 248)
caggttcagctggtgcagtctggagctgaggtgaagaagcctggggcctcagtgaaggtctcctgcaaggctt
ctggttacacctttaccgactacgccatgaactgggtgcgacaggcccctggacaagggcttgagtggatggg
agtgatcagcaccttcagcggtaacacaaacttcaaccagaagttcaagggcagagtcaccatgaccacagac
acatccacgagcacagcctacatggagctgaggagcctgagatctgacgacacggccgtgtattactgtgcga
gaagcgactactacggcccatacttcgactactggggccagggcaccaccctgaccgtgtccagcgataaaac
ccatactaaaccgccaaaaccggcgccggaactgctgggtggtcctggtaccggtactggtggtccgactatt
aaacctccgaaacctccgaaacctgctccgaacctgctgggtggtccggatattgtgatgacccagactccac
tctctctgtccgtcacccctggacagccggcctccatctcctgcaggtctagtcagaccattgtccatagtaa
tggaaacacctatttggagtggtacctgcagaagccaggccagtctccacagctcctgatctataaggtttcc
aaccggttctctggagtgccagataggttcagtggcagcgggtcagggacagatttcacactgaaaatcagcc
gggtggaggctgaggatgttggggtttattactgcttccaaggtagccacgtgcctttcaccttcggcggagg
gaccaaggtggagatcaaacgaact
(amino acids)
(SEQ ID NO: 249)
QVQLVQSGAEVKKPGASVKVSCKASGYTFTDYAMNWVRQAPGQGLEWMGVISTFSGNTNFNQKFKGRVTMTTD
TSTSTAYMELRSLRSDDTAVYYCARSDYYGPYFDYWGQGTTLTVSSDKTHTKPPKPAPELLGGPGTGTGGPTI
KPPKPPKPAPNLLGGPDIVMTQTPLSLSVTPGQPASISCRSSQTIVHSNGNTYLEWYLQKPGQSPQLLIYKVS
NRFSGVPDRFSGSGSGTDFTLKISRVEAEDVGVYYCFQGSHVPFTFGGGTKVEIKRT
Humanized C8 single chain GS3 (linker is +Gly4Ser1+3)
(DNA)
(SEQ ID NO: 250)
gaggtgcagctggtggagtctgggggaggcctggtcaagcctggggggtccctgagactctcctgtgcagcct
ctggattcaccttcagtggctatgccatgagctgggtccgccaggctccagggaaggggctggagtgggtctc
aaccattagtagtggcggaacctacatatactaccctgactcagtgaagggccgattcaccatctccagagac
aacgccaagaactcactgtatctgcaaatgaacagcctgagagccgaggacacggccgtgtattactgtgcga
gactgggcggcgataactattatgaatattggggcaaagggaccacggtcaccgtctcctccggcggtggcgg
atccggcggtggcggatccggcggtggcggatccgacatcgtgatgacccagtctccagactccctggctgtg
tctctgggcgagagggccaccatcaactgcagggccagcaagagtgttagcaccagcggctacagctacatgc
actggtaccagcagaaaccaggacagcctcctaagctgctcatttacctggtgtctaacctggaatccggggt
ccctgaccgattcagtggcagcgggtctgggacagatttcactctcaccatcagcagcctgcaggctgaagat
gtggcagtttattactgtcaacacattcgggaactgaccaggagtgaattcggcggagggaccaaggtggaga
tcaaacgaact
(amino acids)
(SEQ ID NO: 251)
EVQLVESGGGLVKPGGSLRLSCAASGFTFSGYAMSWVRQAPGKGLEWVSTISSGGTYIYYPDSVKGRFTISRD
NAKNSLYLQMNSLRAEDTAVYYCARLGGDNYYEYWGKGTTVTVSSGGGGSGGGGSGGGGSDIVMTQSPDSLAV
SLGERATINCRASKSVSTSGYSYMHWYQQKPGQPPKLLIYLVSNLESGVPDRFSGSGSGTDFTLTISSLQAED
VAVYYCQHIRELTRSEFGGGTKVEIKRT
Humanized C8 single chain IgG1 (no Cysteine)
(DNA)
(SEQ ID NO: 252)
gaggtgcagctggtggagtctgggggaggcctggtcaagcctggggggtccctgagactctcctgtgcagcct
ctggattcaccttcagtggctatgccatgagctgggtccgccaggctccagggaaggggctggagtgggtctc
aaccattagtagtggcggaacctacatatactaccctgactcagtgaagggccgattcaccatctccagagac
aacgccaagaactcactgtatctgcaaatgaacagcctgagagccgaggacacggccgtgtattactgtgcga
gactgggcggcgataactattatgaatattggggcaaagggaccacggtcaccgtctcctccgataaaaccca
tactaaaccgccaaaaccggcgccggaactgctgggtggtcctggtaccggtgacatcgtgatgacccagtct
ccagactccctggctgtgtctctgggcgagagggccaccatcaactgcagggccagcaagagtgttagcacca
gcggctacagctacatgcactggtaccagcagaaaccaggacagcctcctaagctgctcatttacctggtgtc
taacctggaatccggggtccctgaccgattcagtggcagcgggtctgggacagatttcactctcaccatcagc
agcctgcaggctgaagatgtggcagtttattactgtcaacacattcgggaactgaccaggagtgaattcggcg
gagggaccaaggtggagatcaaacgaact
(amino acids)
(SEQ ID NO: 253)
EVQLVESGGGLVKPGGSLRLSCAASGFTFSGYAMSWVRQAPGKGLEWVSTISSGGTYIYYPDSVKGRFTISRD
NAKNSLYLQMNSLRAEDTAVYYCARLGGDNYYEYWGKGTTVTVSSDKTHTKPPKPAPELLGGPGTGDIVMTQS
PDSLAVSLGERATINCRASKSVSTSGYSYMHWYQQKPGQPPKLLIYLVSNLESGVPDRFSGSGSGTDFTLTIS
SLQAEDVAVYYCQHIRELTRSEFGGGTKVEIKRT
Humanized C8 single chain X4 (linker is IgG1 and IgG2 modified hinge
region)
(DNA)
(SEQ ID NO: 254)
gaggtgcagctggtggagtctgggggaggcctggtcaagcctggggggtccctgagactctcctgtgcagcct
ctggattcaccttcagtggctatgccatgagctgggtccgccaggctccagggaaggggctggagtgggtctc
aaccattagtagtggcggaacctacatatactacccagactcagtgaagggccgattcaccatctccagagac
aacgccaagaactcactgtatctgcaaatgaacagcctgagagccgaggacacggccgtgtattactgtgcga
gactgggcggcgacaattactatgagtattggggcaaagggaccacggtcaccgtctcctccgataaaaccca
tactaaaccgccaaaaccggcgccggaactgctgggtggtcctggtaccggtactggtggtccgactattaaa
cctccgaaacctccgaaacctgctccgaacctgctgggtggtccggacatcgtgatgacccagtctccagact
ccctggctgtgtctctgggcgagagggccaccatcaactgcagggccagcaagagtgttagcaccagcggcta
cagctacatgcactggtaccagcagaaaccaggacagcctcctaagctgctcatttacctggtgtctaacctg
gaatccggggtccctgaccgattcagtggcagcgggtctgggacagatttcactctcaccatcagcagcctgc
aggctgaagatgtggcagtttattactgtcaacacattcgggaactgaccaggagtgaattcggcggagggac
caaggtggagatcaaacgaact
(amino acids)
(SEQ ID NO: 255)
EVQLVESGGGLVKPGGSLRLSCAASGFTFSGYAMSWVRQAPGKGLEWVSTISSGGTYIYYPDSVKGRFTISRD
NAKNSLYLQMNSLRAEDTAVYYCARLGGDNYYEYWGKGTTVTVSSDKTHTKPPKPAPELLGGPGTGTGGPTIK
PPKPPKPAPNLLGGPDIVMTQSPDSLAVSLGERATINCRASKSVSTSGYSYMHWYQQKPGQPPKLLIYLVSNL
ESGVPDRFSGSGSGTDFTLTISSLQAEDVAVYYCQHIRELTRSEFGGGTKVEIKRT
pSECTag2 E6 scFV-FC
(DNA)
(SEQ ID NO: 256)
atggagacagacacactcctgctatgggtactgctgctctgggttccaggttccactggtgacgcgg
cccagccggccgaggtgcagctggtggagtctgggggaggcctggtcaagcctggggggtccctgag
actctcctgtgcagcctctggattcaccttcagtaggtatggcatgagctgggtccgccaggctcca
gggaagaggctggagtgggtctcaaccattagtggcggaggcacctacatatactacccagactcag
tgaagggccgattcaccatctccagagacaacgccaagaacaccctgtatctgcaaatgaacagcct
gagagccgaggacacggctgtgtattactgtaccagagataactatggccgcaactatgattatggc
atggattattggggccagggcaccctggtgaccgtgagcagcggcggtggcggatccggcggtggcg
gatccggcggtggcggatccgaaattgtgttgacacagtctccagccaccctgtctttgtctccagg
ggaaagagccaccctcacctgcagcgccaccagcagtgttagctacatccactggtaccaacagagg
cctggccagagccccaggctcctcatctatagcacctccaacctggccagcggcatcccagccaggt
tcagtggcagtgggtctgggagcgactacactctcaccatcagcagcctagagcctgaagattttgc
agtttattactgtcagcagcgtagcagctcccctttcacctttggcagcggcaccaaagtggaaatt
aaagagcccaaatcttgtgacaaaactcacacatgcccaccgtgcccagcacctgaactcctggggg
gaccgtcagtcttcctcttccccccaaaacccaaggacaccctcatgatctcccggacccctgaggt
cacatgcgtggtggtggacgtgagccacgaagaccctgaggtcaagttcaactggtacgtggacggc
gtggaggtgcataatgccaagacaaagccgcgggaggagcagtacaacagcacgtaccgtgtggtca
gcgtcctcaccgtcctgcaccaggactggctgaatggcaaggagtacaagtgcaaggtctccaacaa
agccctcccagcccccatcgagaaaaccatctccaaagccaaagggcagccccgagaaccacaggtg
tacaccctgcccccatcccgggaggagatgaccaagaaccaggtcagcctgacctgcctggtcaaag
gcttctatcccagcgacatcgccgtggagtgggagagcaatgggcagccggagaacaactacaagac
cacgcctcccgtgctggactccgacggctccttcttcctctacagcaagctcaccgtggacaagagc
aggtggcagcaggggaacgtcttctcatgctccgtgatgcatgaggctctgcacaaccactacacgc
agaagagcctctccctgtctccgggtaaatgataa
(amino acids)
(SEQ ID NO: 257)
METDTLLLWVLLLWVPGSTGDAAQPAEVQLVESGGGLVKPGGSLRLSCAASGFTFSRYGMSWVRQAP
GKRLEWVSTISGGGTYIYYPDSVKGRFTISRDNAKNTLYLQMNSLRAEDTAVYYCTRDNYGRNYDYG
MDYWGQGTLVTVSSGGGGSGGGGSGGGGSEIVLTQSPATLSLSPGERATLTCSATSSVSYIHWYQQR
PGQSPRLLIYSTSNLASGIPARFSGSGSGSDYTLTISSLEPEDFAVYYCQQRSSSPFTFGSGTKVEI
KEPKSCDKTHTCPPCPAPELLGGPSVFLFPPKPKDTLMISRTPEVTCVVVDVSHEDPEVKFNWYVDG
VEVHNAKTKPREEQYNSTYRVVSVLTVLHQDWLNGKEYKCKVSNKALPAPIEKTISKAKGQPREPQV
YTLPPSREEMTKNQVSLTCLVKGFYPSDIAVEWESNGQPENNYKTTPPVLDSDGSFFLYSKLTVDKS
RWQQGNVFSCSVMHEALHNHYTQKSLSLSPGK**
E6 scFC-FC 1 gBLOCk sequence:
(SEQ ID NO: 258)
tgctctgggttccaggttccactggtgacgcggcccagccggccgaggtgcagctggtggagtctgg
gggaggcctggtcaagcctggggggtccctgagactctcctgtgcagcctctggattcaccttcagt
aggtatggcatgagctgggtccgccaggctccagggaagaggctggagtgggtctcaaccattagtg
gcggaggcacctacatatactacccagactcagtgaagggccgattcaccatctccagagacaacgc
caagaacaccctgtatctgcaaatgaacagcctgagagccgaggacacggctgtgtattactgtacc
agagataactatggccgcaactatgattatggcatggattattggggccagggcaccctggtgaccg
tgagcagcggcggtggcggatccggcggtggcggatccggcggtggcggatccgaaattgtgttgac
acagtctccagccaccctgtctttgtc
E6 scFC-FC 2 gBLOCk sequence:
(SEQ ID NO: 259)
aattgtgttgacacagtctccagccaccctgtctttgtctccaggggaaagagccaccctcacctgc
agcgccaccagcagtgttagctacatccactggtaccaacagaggcctggccagagccccaggctcc
tcatctatagcacctccaacctggccagcggcatcccagccaggttcagtggcagtgggtctgggag
cgactacactctcaccatcagcagcctagagcctgaagattttgcagtttattactgtcagcagcgt
agcagctcccctttcacctttggcagcggcaccaaagtggaaattaaagagcccaaatcttgtgaca
aaactcacacatgcccaccgtgcccagcacctgaactcctggggggaccgtcagtcttcctcttccc
cccaaaacccaaggacaccctcatgatctcccggacccctgaggtcacatgcgtggtggtggacgtg
agccacgaagaccctgaggtcaagttcaactggtacgtggacggcgtggaggtgcataatgccaaga
caaagccgcgggaggagcagtacaacagcacgtaccgtgtggtcagc
pSECTag2 C2 scFV-FC
(DNA)
(SEQ ID NO: 260)
atggagacagacacactcctgctatgggtactgctgctctgggttccaggttccactggtgacgcgg
cccagccggccgaggtgcagctggtggagtctgggggaggcctggtcaagcctggggggtccctgag
actctcctgtgcagcctctggattcaccttcagtggctatgccatgagctgggtccgccaggctcca
gggaaggggctggagtgggtctcaaccattagtagtggcggaacctacatatactaccccgactcag
tgaagggccgattcaccatctccagagacaacgccaagaactcactgtatctgcaaatgaacagcct
gagagccgaggacacggccgtgtattactgtgcgagacttgggggggataattactacgaatacttc
gatgtctggggcaaagggaccacggtcaccgtctcctccggcggtggcggatccggcggtggcggat
ccggcggtggcggatccgacattgtgctgacccagtctccagcctccttggccgtgtctccaggaca
gagggccaccatcacctgcagagccagtaagagtgtcagtaccagcggatactcctacatgcactgg
tatcagcagaaaccaggacaacctcctaaactcctgatttacctggcatccaatctggagagcgggg
tcccagccaggttcagcggcagtgggtctgggaccgatttcaccctcacaattaatcctgtggaagc
taatgatactgcaaattattactgtcagcacagtagggagctgcctttcacattcggcggagggacc
aaggtggagatcaaacgaactgagcccaaatcttgtgacaaaactcacacatgcccaccgtgcccag
cacctgaactcctggggggaccgtcagtcttcctcttccccccaaaacccaaggacaccctcatgat
ctcccggacccctgaggtcacatgcgtggtggtggacgtgagccacgaagaccctgaggtcaagttc
aactggtacgtggacggcgtggaggtgcataatgccaagacaaagccgcgggaggagcagtacaaca
gcacgtaccgtgtggtcagcgtcctcaccgtcctgcaccaggactggctgaatggcaaggagtacaa
gtgcaaggtctccaacaaagccctcccagcccccatcgagaaaaccatctccaaagccaaagggcag
ccccgagaaccacaggtgtacaccctgcccccatcccgggaggagatgaccaagaaccaggtcagcc
tgacctgcctggtcaaaggcttctatcccagcgacatcgccgtggagtgggagagcaatgggcagcc
ggagaacaactacaagaccacgcctcccgtgctggactccgacggctccttcttcctctacagcaag
ctcaccgtggacaagagcaggtggcagcaggggaacgtcttctcatgctccgtgatgcatgaggctc
tgcacaaccactacacgcagaagagcctctccctgtctccgggtaaatgataa
(amino acids)
(SEQ ID NO: 261)
METDTLLLWVLLLWVPGSTGDAAQPAEVQLVESGGGLVKPGGSLRLSCAASGFTFSGYAMSWVRQAP
GKGLEWVSTISSGGTYIYYPDSVKGRFTISRDNAKNSLYLQMNSLRAEDTAVYYCARLGGDNYYEYF
DVWGKGTTVTVSSGGGGSGGGGSGGGGSDIVLTQSPASLAVSPGQRATITCRASKSVSTSGYSYMHW
YQQKPGQPPKLLIYLASNLESGVPARFSGSGSGTDFTLTINPVEANDTANYYCQHSRELPFTFGGGT
KVEIKRTEPKSCDKTHTCPPCPAPELLGGPSVFLFPPKPKDTLMISRTPEVTCVVVDVSHEDPEVKF
NWYVDGVEVHNAKTKPREEQYNSTYRVVSVLTVLHQDWLNGKEYKCKVSNKALPAPIEKTISKAKGQ
PREPQVYTLPPSREEMTKNQVSLTCLVKGFYPSDIAVEWESNGQPENNYKTTPPVLDSDGSFFLYSK
LTVDKSRWQQGNVESCSVMHEALHNHYTQKSLSLSPGK**
C2 scFV-FC 1 gBLOCk sequence:
(DNA)
(SEQ ID NO: 262)
tgctctgggttccaggttccactggtgacgcggcccagccggccgaggtgcagctggtggagtctgg
gggaggcctggtcaagcctggggggtccctgagactctcctgtgcagcctctggattcaccttcagt
ggctatgccatgagctgggtccgccaggctccagggaaggggctggagtgggtctcaaccattagta
gtggcggaacctacatatactaccccgactcagtgaagggccgattcaccatctccagagacaacgc
caagaactcactgtatctgcaaatgaacagcctgagagccgaggacacggccgtgtattactgtgcg
agacttgggggggataattactacgaatacttcgatgtctggggcaaagggaccacggtcaccgtct
cctccggcggtggcggatccggcggtggcggatccggcggtggcggatccgacattgtgctgaccca
gtctccagcctccttggc
C2 scFV-FC 2 gBLOCk sequence:
(DNA)
(SEQ ID NO: 263)
cattgtgctgacccagtctccagcctccttggccgtgtctccaggacagagggccaccatcacctgc
agagccagtaagagtgtcagtaccagcggatactcctacatgcactggtatcagcagaaaccaggac
aacctcctaaactcctgatttacctggcatccaatctggagagcggggtcccagccaggttcagcgg
cagtgggtctgggaccgatttcaccctcacaattaatcctgtggaagctaatgatactgcaaattat
tactgtcagcacagtagggagctgcctttcacattcggcggagggaccaaggtggagatcaaacgaa
ctgagcccaaatcttgtgacaaaactcacacatgcccaccgtgcccagcacctgaactcctgggggg
accgtcagtcttcctcttccccccaaaacccaaggacaccctcatgatctcccggacccctgaggtc
acatgcgtggtggtggacgtgagccacgaagaccctgaggtcaagttcaactggtacgtggacggcg
tggaggtgcataatgccaagacaaagccgcgggaggagcagtacaacagcacgtaccgtgtggtcag
c
pSECTag2 C3 scFV-FC
(DNA)
(SEQ ID NO: 264)
atggagacagacacactcctgctatgggtactgctgctctgggttccaggttccactggtgacgcgg
cccagccggcccaggttcagctggtgcagtctggagctgaggtgaagaagcctggggcctcagtgaa
ggtctcctgcaaggcttctggttacacctttaccgactacgccatgaactgggtgcgacaggcccct
ggacaagggcttgagtggatgggagtgatcagcaccttcagcggtaacacaaacttcaaccagaagt
tcaagggcagagtcaccatgaccacagacacatccacgagcacagcctacatggagctgaggagcct
gagatctgacgacacggccgtgtattactgtgcgagaagcgactactacggcccatacttcgactac
tggggccagggcaccaccctgaccgtgtccagcggcggtggcggatccggcggtggcggatccggcg
gtggcggatccgatattgtgatgacccagactccactctctctgtccgtcacccctggacagccggc
ctccatctcctgcaggtctagtcagaccattgtccatagtaatggaaacacctatttggagtggtac
ctgcagaagccaggccagtctccacagctcctgatctataaggtttccaaccggttctctggagtgc
cagataggttcagtggcagcgggtcagggacagatttcacactgaaaatcagccgggtggaggctga
ggatgttggggtttattactgcttccaaggtagccacgtgcctttcaccttcggcggagggaccaag
gtggagatcaaacgaactgagcccaaatcttgtgacaaaactcacacatgcccaccgtgcccagcac
ctgaactcctggggggaccgtcagtcttcctcttccccccaaaacccaaggacaccctcatgatctc
ccggacccctgaggtcacatgcgtggtggtggacgtgagccacgaagaccctgaggtcaagttcaac
tggtacgtggacggcgtggaggtgcataatgccaagacaaagccgcgggaggagcagtacaacagca
cgtaccgtgtggtcagcgtcctcaccgtcctgcaccaggactggctgaatggcaaggagtacaagtg
caaggtctccaacaaagccctcccagcccccatcgagaaaaccatctccaaagccaaagggcagccc
cgagaaccacaggtgtacaccctgcccccatcccgggaggagatgaccaagaaccaggtcagcctga
cctgcctggtcaaaggcttctatcccagcgacatcgccgtggagtgggagagcaatgggcagccgga
gaacaactacaagaccacgcctcccgtgctggactccgacggctccttcttcctctacagcaagctc
accgtggacaagagcaggtggcagcaggggaacgtcttctcatgctccgtgatgcatgaggctctgc
acaaccactacacgcagaagagcctctccctgtctccgggtaaatgataa
(amino acids)
(SEQ ID NO: 265)
METDTLLLWVLLLWVPGSTGDAAQPAQVQLVQSGAEVKKPGASVKVSCKASGYTFTDYAMNWVRQAPGQGLEW
MGVISTFSGNTNFNQKFKGRVTMTTDTSTSTAYMELRSLRSDDTAVYYCARSDYYGPYFDYWGQGTTLTVSSG
GGGSGGGGSGGGGSDIVMTQTPLSLSVTPGQPASISCRSSQTIVHSNGNTYLEWYLQKPGQSPQLLIYKVSNR
FSGVPDRFSGSGSGTDFTLKISRVEAEDVGVYYCFQGSHVPFTFGGGTKVEIKRTEPKSCDKTHTCPPCPAPE
LLGGPSVFLFPPKPKDTLMISRTPEVTCVVVDVSHEDPEVKFNWYVDGVEVHNAKTKPREEQYNSTYRVVSVL
TVLHQDWLNGKEYKCKVSNKALPAPIEKTISKAKGQPREPQVYTLPPSREEMTKNQVSLTCLVKGFYPSDIAV
EWESNGQPENNYKTTPPVLDSDGSFFLYSKLTVDKSRWQQGNVFSCSVMHEALHNHYTQKSLSLSPGK**
C3 GS scFV FC 1 gBLOCk sequence:
(DNA)
(SEQ ID NO: 266)
tgctctgggttccaggttccactggtgacgcggcccagccggcccaggttcagctggtgcagtctgg
agctgaggtgaagaagcctggggcctcagtgaaggtctcctgcaaggcttctggttacacctttacc
gactacgccatgaactgggtgcgacaggcccctggacaagggcttgagtggatgggagtgatcagca
ccttcagcggtaacacaaacttcaaccagaagttcaagggcagagtcaccatgaccacagacacatc
cacgagcacagcctacatggagctgaggagcctgagatctgacgacacggccgtgtattactgtgcg
agaagcgactactacggcccatacttcgactactggggccagggcaccaccctgaccgtgtccagcg
gcggtggcggatccggcggtggcggatccggcggtggcggatccgatattgtgatgacccagactcc
actctctctgt
C3 scFV FC2 gBLOCk sequence:
(DNA)
(SEQ ID NO: 267)
tattgtgatgacccagactccactctctctgtccgtcacccctggacagccggcctccatctcctgc
aggtctagtcagaccattgtccatagtaatggaaacacctatttggagtggtacctgcagaagccag
gccagtctccacagctcctgatctataaggtttccaaccggttctctggagtgccagataggttcag
tggcagcgggtcagggacagatttcacactgaaaatcagccgggtggaggctgaggatgttggggtt
tattactgcttccaaggtagccacgtgcctttcaccttcggcggagggaccaaggtggagatcaaac
gaactgagcccaaatcttgtgacaaaactcacacatgcccaccgtgcccagcacctgaactcctggg
gggaccgtcagtcttcctcttccccccaaaacccaaggacaccctcatgatctcccggacccctgag
gtcacatgcgtggtggtggacgtgagccacgaagaccctgaggtcaagttcaactggtacgtggacg
gcgtggaggtgcataatgccaagacaaagccgcgggaggagcagtacaacagcacgtaccgtgtggt
cagc
pSECTag2 C8 scFV-FC
(DNA)
(SEQ ID NO: 268)
atggagacagacacactcctgctatgggtactgctgctctgggttccaggttccactggtgacgcgg
cccagccggccgaggtgcagctggtggagtctgggggaggcctggtcaagcctggggggtccctgag
actctcctgtgcagcctctggattcaccttcagtggctatgccatgagctgggtccgccaggctcca
gggaaggggctggagtgggtctcaaccattagtagtggcggaacctacatatactaccctgactcag
tgaagggccgattcaccatctccagagacaacgccaagaactcactgtatctgcaaatgaacagcct
gagagccgaggacacggccgtgtattactgtgcgagactgggcggcgataactattatgaatattgg
ggcaaagggaccacggtcaccgtctcctccggcggtggcggatccggcggtggcggatccggcggtg
gcggatccgacatcgtgatgacccagtctccagactccctggctgtgtctctgggcgagagggccac
catcaactgcagggccagcaagagtgttagcaccagcggctacagctacatgcactggtaccagcag
aaaccaggacagcctcctaagctgctcatttacctggtgtctaacctggaatccggggtccctgacc
gattcagtggcagcgggtctgggacagatttcactctcaccatcagcagcctgcaggctgaagatgt
ggcagtttattactgtcaacacattcgggaactgaccaggagtgaattcggcggagggaccaaggtg
gagatcaaacgaactgagcccaaatcttgtgacaaaactcacacatgcccaccgtgcccagcacctg
aactcctggggggaccgtcagtcttcctcttccccccaaaacccaaggacaccctcatgatctcccg
gacccctgaggtcacatgcgtggtggtggacgtgagccacgaagaccctgaggtcaagttcaactgg
tacgtggacggcgtggaggtgcataatgccaagacaaagccgcgggaggagcagtacaacagcacgt
accgtgtggtcagcgtcctcaccgtcctgcaccaggactggctgaatggcaaggagtacaagtgcaa
ggtctccaacaaagccctcccagcccccatcgagaaaaccatctccaaagccaaagggcagccccga
gaaccacaggtgtacaccctgcccccatcccgggaggagatgaccaagaaccaggtcagcctgacct
gcctggtcaaaggcttctatcccagcgacatcgccgtggagtgggagagcaatgggcagccggagaa
caactacaagaccacgcctcccgtgctggactccgacggctccttcttcctctacagcaagctcacc
gtggacaagagcaggtggcagcaggggaacgtcttctcatgctccgtgatgcatgaggctctgcaca
accactacacgcagaagagcctctccctgtctccgggtaaatgataa
(amino acids)
(SEQ ID NO: 269)
METDTLLLWVLLLWVPGSTGDAAQPAEVQLVESGGGLVKPGGSLRLSCAASGFTFSGYAMSWVRQAPGKGLEW
VSTISSGGTYIYYPDSVKGRFTISRDNAKNSLYLQMNSLRAEDTAVYYCARLGGDNYYEYWGKGTTVTVSSGG
GGSGGGGSGGGGSDIVMTQSPDSLAVSLGERATINCRASKSVSTSGYSYMHWYQQKPGQPPKLLIYLVSNLES
GVPDRFSGSGSGTDFTLTISSLQAEDVAVYYCQHIRELTRSEFGGGTKVEIKRTEPKSCDKTHTCPPCPAPEL
LGGPSVFLFPPKPKDTLMISRTPEVTCVVVDVSHEDPEVKFNWYVDGVEVHNAKTKPREEQYNSTYRVVSVLT
VLHQDWLNGKEYKCKVSNKALPAPIEKTISKAKGQPREPQVYTLPPSREEMTKNQVSLTCLVKGFYPSDIAVE
WESNGQPENNYKTTPPVLDSDGSFFLYSKLTVDKSRWQQGNVFSCSVMHEALHNHYTQKSLSLSPGK**
C8 scFV FC 1 gBLOCk sequence:
(DNA)
(SEQ ID NO: 270)
tgctctgggttccaggttccactggtgacgcggcccagccggccgaggtgcagctggtggagtctgg
gggaggcctggtcaagcctggggggtccctgagactctcctgtgcagcctctggattcaccttcagt
ggctatgccatgagctgggtccgccaggctccagggaaggggctggagtgggtctcaaccattagta
gtggcggaacctacatatactaccctgactcagtgaagggccgattcaccatctccagagacaacgc
caagaactcactgtatctgcaaatgaacagcctgagagccgaggacacggccgtgtattactgtgcg
agactgggcggcgataactattatgaatattggggcaaagggaccacggtcaccgtctcctccggcg
gtggcggatccggcggtggcggatccggcggtggcggatccgacatcgtgatgacccagtctccaga
ctccctgg
C8 scFV FC2 gBLOCk sequence:
(DNA)
(SEQ ID NO: 271)
catcgtgatgacccagtctccagactccctggctgtgtctctgggcgagagggccaccatcaactgc
agggccagcaagagtgttagcaccagcggctacagctacatgcactggtaccagcagaaaccaggac
agcctcctaagctgctcatttacctggtgtctaacctggaatccggggtccctgaccgattcagtgg
cagcgggtctgggacagatttcactctcaccatcagcagcctgcaggctgaagatgtggcagtttat
tactgtcaacacattcgggaactgaccaggagtgaattcggcggagggaccaaggtggagatcaaac
gaactgagcccaaatcttgtgacaaaactcacacatgcccaccgtgcccagcacctgaactcctggg
gggaccgtcagtcttcctcttccccccaaaacccaaggacaccctcatgatctcccggacccctgag
gtcacatgcgtggtggtggacgtgagccacgaagaccctgaggtcaagttcaactggtacgtggacg
gcgtggaggtgcataatgccaagacaaagccgcgggaggagcagtacaacagcacgtaccgtgtggt
cagc
Human IgG1 Fc sequence:
(DNA)
(SEQ ID NO: 272)
gagcccaaatcttgtgacaaaactcacacatgcccaccgtgcccagcacctgaactcctggggggaccgtcag
tcttcctcttccccccaaaacccaaggacaccctcatgatctcccggacccctgaggtcacatgcgtggtggt
ggacgtgagccacgaagaccctgaggtcaagttcaactggtacgtggacggcgtggaggtgcataatgccaag
acaaagccgcgggaggagcagtacaacagcacgtaccgtgtggtcagcgtcctcaccgtcctgcaccaggact
ggctgaatggcaaggagtacaagtgcaaggtctccaacaaagccctcccagcccccatcgagaaaaccatctc
caaagccaaagggcagccccgagaaccacaggtgtacaccctgcccccatcccgggaggagatgaccaagaac
caggtcagcctgacctgcctggtcaaaggcttctatcccagcgacatcgccgtggagtgggagagcaatgggc
agccggagaacaactacaagaccacgcctcccgtgctggactccgacggctccttcttcctctacagcaagct
caccgtggacaagagcaggtggcagcaggggaacgtcttctcatgctccgtgatgcatgaggctctgcacaac
cactacacgcagaagagcctctccctgtctccgggtaaatgataa
(amino acids)
(SEQ ID NO: 273)
EPKSCDKTHTCPPCPAPELLGGPSVFLFPPKPKDTLMISRTPEVTCVVVDVSHEDPEVKFNWYVDGVEVHNAK
TKPREEQYNSTYRVVSVLTVLHQDWLNGKEYKCKVSNKALPAPIEKTISKAKGQPREPQVYTLPPSREEMTKN
QVSLTCLVKGFYPSDIAVEWESNGQPENNYKTTPPVLDSDGSFFLYSKLTVDKSRWQQGNVFSCSVMHEALHN
HYTQKSLSLSPGK**
Human IgG1 CH2-CH3 domain sequence:
(DNA)
(SEQ ID NO: 274)
ccgtgcccagcacctgaactcctggggggaccgtcagtcttcctcttccccccaaaacccaaggacaccctca
tgatctcccggacccctgaggtcacatgcgtggtggtggacgtgagccacgaagaccctgaggtcaagttcaa
ctggtacgtggacggcgtggaggtgcataatgccaagacaaagccgcgggaggagcagtacaacagcacgtac
cgtgtggtcagcgtcctcaccgtcctgcaccaggactggctgaatggcaaggagtacaagtgcaaggtctcca
acaaagccctcccagcccccatcgagaaaaccatctccaaagccaaagggcagccccgagaaccacaggtgta
caccctgcccccatcccgggaggagatgaccaagaaccaggtcagcctgacctgcctggtcaaaggcttctat
cccagcgacatcgccgtggagtgggagagcaatgggcagccggagaacaactacaagaccacgcctcccgtgc
tggactccgacggctccttcttcctctacagcaagctcaccgtggacaagagcaggtggcagcaggggaacgt
cttctcatgctccgtgatgcatgaggctctgcacaaccactacacgcagaagagcctctccctgtctccgggt
aaatgataa
(amino acids)
(SEQ ID NO: 275)
PCPAPELLGGPSVFLFPPKPKDTLMISRTPEVTCVVVDVSHEDPEVKFNWYVDGVEVHNAKTKPREEQYNSTY
RVVSVLTVLHQDWLNGKEYKCKVSNKALPAPIEKTISKAKGQPREPQVYTLPPSREEMTKNQVSLTCLVKGFY
PSDIAVEWESNGQPENNYKTTPPVLDSDGSFFLYSKLTVDKSRWQQGNVFSCSVMHEALHNHYTQKSLSLSPG
K**
Human IgG1 CH3 domain sequence:
(DNA)
(SEQ ID NO: 276)
gggcagccccgagaaccacaggtgtacaccctgcccccatcccgggaggagatgaccaagaaccaggtcagcc
tgacctgcctggtcaaaggcttctatcccagcgacatcgccgtggagtgggagagcaatgggcagccggagaa
caactacaagaccacgcctcccgtgctggactccgacggctccttcttcctctacagcaagctcaccgtggac
aagagcaggtggcagcaggggaacgtcttctcatgctccgtgatgcatgaggctctgcacaaccactacacgc
agaagagcctctccctgtctccgggtaaatgataa
(amino acids)
(SEQ ID NO: 277)
GQPREPQVYTLPPSREEMTKNQVSLTCLVKGFYPSDIAVEWESNGQPENNYKTTPPVLDSDGSFFLYSKLTVD
KSRWQQGNVFSCSVMHEALHNHYTQKSLSLSPGK**
Human IgG1 Fc Y407R sequence:
(DNA)
(SEQ ID NO: 278)
gagcccaaatcttgtgacaaaactcacacatgcccaccgtgcccagcacctgaactcctggggggaccgtcag
tcttcctcttccccccaaaacccaaggacaccctcatgatctcccggacccctgaggtcacatgcgtggtggt
ggacgtgagccacgaagaccctgaggtcaagttcaactggtacgtggacggcgtggaggtgcataatgccaag
acaaagccgcgggaggagcagtacaacagcacgtaccgtgtggtcagcgtcctcaccgtcctgcaccaggact
ggctgaatggcaaggagtacaagtgcaaggtctccaacaaagccctcccagcccccatcgagaaaaccatctc
caaagccaaagggcagccccgagaaccacaggtgtacaccctgcccccatcccgggaggagatgaccaagaac
caggtcagcctgacctgcctggtcaaaggcttctatcccagcgacatcgccgtggagtgggagagcaatgggc
agccggagaacaactacaagaccacgcctcccgtgctggactccgacggctccttcttcctcaggagcaagct
caccgtggacaagagcaggtggcagcaggggaacgtcttctcatgctccgtgatgcatgaggctctgcacaac
cactacacgcagaagagcctctccctgtctccgggtaaatgataa
(amino acids)
(SEQ ID NO: 279)
EPKSCDKTHTCPPCPAPELLGGPSVFLFPPKPKDTLMISRTPEVTCVVVDVSHEDPEVKFNWYVDGVEVHNAK
TKPREEQYNSTYRVVSVLTVLHQDWLNGKEYKCKVSNKALPAPIEKTISKAKGQPREPQVYTLPPSREEMTKN
QVSLTCLVKGFYPSDIAVEWESNGQPENNYKTTPPVLDSDGSFFLRSKLTVDKSRWQQGNVFSCSVMHEALHN
HYTQKSLSLSPGK**
Human IgG1 Fc F405Q sequence:
(DNA)
(SEQ ID NO: 280)
gagcccaaatcttgtgacaaaactcacacatgcccaccgtgcccagcacctgaactcctggggggaccgtcag
tcttcctcttccccccaaaacccaaggacaccctcatgatctcccggacccctgaggtcacatgcgtggtggt
ggacgtgagccacgaagaccctgaggtcaagttcaactggtacgtggacggcgtggaggtgcataatgccaag
acaaagccgcgggaggagcagtacaacagcacgtaccgtgtggtcagcgtcctcaccgtcctgcaccaggact
ggctgaatggcaaggagtacaagtgcaaggtctccaacaaagccctcccagcccccatcgagaaaaccatctc
caaagccaaagggcagccccgagaaccacaggtgtacaccctgcccccatcccgggaggagatgaccaagaac
caggtcagcctgacctgcctggtcaaaggcttctatcccagcgacatcgccgtggagtgggagagcaatgggc
agccggagaacaactacaagaccacgcctcccgtgctggactccgacggctccttccagctctacagcaagct
caccgtggacaagagcaggtggcagcaggggaacgtcttctcatgctccgtgatgcatgaggctctgcacaac
cactacacgcagaagagcctctccctgtctccgggtaaatgataa
(amino acids)
(SEQ ID NO: 281)
EPKSCDKTHTCPPCPAPELLGGPSVFLFPPKPKDTLMISRTPEVTCVVVDVSHEDPEVKFNWYVDGV
EVHNAKTKPREEQYNSTYRVVSVLTVLHQDWLNGKEYKCKVSNKALPAPIEKTISKAKGQPREPQVY
TLPPSREEMTKNQVSLTCLVKGFYPSDIAVEWESNGQPENNYKTTPPVLDSDGSFQLYSKLTVDKSR
WQQGNVFSCSVMHEALHNHYTQKSLSLSPGK**
Human IgG1 Fc T394D sequence:
(DNA)
(SEQ ID NO: 282)
gagcccaaatcttgtgacaaaactcacacatgcccaccgtgcccagcacctgaactcctggggggaccgtcag
tcttcctcttccccccaaaacccaaggacaccctcatgatctcccggacccctgaggtcacatgcgtggtggt
ggacgtgagccacgaagaccctgaggtcaagttcaactggtacgtggacggcgtggaggtgcataatgccaag
acaaagccgcgggaggagcagtacaacagcacgtaccgtgtggtcagcgtcctcaccgtcctgcaccaggact
ggctgaatggcaaggagtacaagtgcaaggtctccaacaaagccctcccagcccccatcgagaaaaccatctc
caaagccaaagggcagccccgagaaccacaggtgtacaccctgcccccatcccgggaggagatgaccaagaac
caggtcagcctgacctgcctggtcaaaggcttctatcccagcgacatcgccgtggagtgggagagcaatgggc
agccggagaacaactacaagaccgaccctcccgtgctggactccgacggctccttcttcctctacagcaagct
caccgtggacaagagcaggtggcagcaggggaacgtcttctcatgctccgtgatgcatgaggctctgcacaac
cactacacgcagaagagcctctccctgtctccgggtaaatgataa
(amino acids)
(SEQ ID NO: 283)
EPKSCDKTHTCPPCPAPELLGGPSVFLFPPKPKDTLMISRTPEVTCVVVDVSHEDPEVKFNWYVDGV
EVHNAKTKPREEQYNSTYRVVSVLTVLHQDWLNGKEYKCKVSNKALPAPIEKTISKAKGQPREPQVY
TLPPSREEMTKNQVSLTCLVKGFYPSDIAVEWESNGQPENNYKTDPPVLDSDGSFFLYSKLTVDKSR
WQQGNVFSCSVMHEALHNHYTQKSLSLSPGK**
Human IgG1 Fc T366W/L368W sequence:
(DNA)
(SEQ ID NO: 284)
gagcccaaatcttgtgacaaaactcacacatgcccaccgtgcccagcacctgaactcctggggggaccgtcag
tcttcctcttccccccaaaacccaaggacaccctcatgatctcccggacccctgaggtcacatgcgtggtggt
ggacgtgagccacgaagaccctgaggtcaagttcaactggtacgtggacggcgtggaggtgcataatgccaag
acaaagccgcgggaggagcagtacaacagcacgtaccgtgtggtcagcgtcctcaccgtcctgcaccaggact
ggctgaatggcaaggagtacaagtgcaaggtctccaacaaagccctcccagcccccatcgagaaaaccatctc
caaagccaaagggcagccccgagaaccacaggtgtacaccctgcccccatcccgggaggagatgaccaagaac
caggtcagcctgtggtgctgggtcaaaggcttctatcccagcgacatcgccgtggagtgggagagcaatgggc
agccggagaacaactacaagaccacgcctcccgtgctggactccgacggctccttcttcctctacagcaagct
caccgtggacaagagcaggtggcagcaggggaacgtcttctcatgctccgtgatgcatgaggctctgcacaac
cactacacgcagaagagcctctccctgtctccgggtaaatgataa
(amino acids)
(SEQ ID NO: 285)
EPKSCDKTHTCPPCPAPELLGGPSVFLFPPKPKDTLMISRTPEVTCVVVDVSHEDPEVKFNWYVDGV
EVHNAKTKPREEQYNSTYRVVSVLTVLHQDWLNGKEYKCKVSNKALPAPIEKTISKAKGQPREPQVY
TLPPSREEMTKNQVSLWCWVKGFYPSDIAVEWESNGQPENNYKTTPPVLDSDGSFFLYSKLTVDKSR
WQQGNVFSCSVMHEALHNHYTQKSLSLSPGK**
Human IgG1 Fc T364R/L368R sequence:
(DNA)
(SEQ ID NO: 286)
gagcccaaatcttgtgacaaaactcacacatgcccaccgtgcccagcacctgaactcctggggggaccgtcag
tcttcctcttccccccaaaacccaaggacaccctcatgatctcccggacccctgaggtcacatgcgtggtggt
ggacgtgagccacgaagaccctgaggtcaagttcaactggtacgtggacggcgtggaggtgcataatgccaag
acaaagccgcgggaggagcagtacaacagcacgtaccgtgtggtcagcgtcctcaccgtcctgcaccaggact
ggctgaatggcaaggagtacaagtgcaaggtctccaacaaagccctcccagcccccatcgagaaaaccatctc
caaagccaaagggcagccccgagaaccacaggtgtacaccctgcccccatcccgggaggagatgaccaagaac
caggtcaggctgacctgcagggtcaaaggcttctatcccagcgacatcgccgtggagtgggagagcaatgggc
agccggagaacaactacaagaccacgcctcccgtgctggactccgacggctccttcttcctctacagcaagct
caccgtggacaagagcaggtggcagcaggggaacgtcttctcatgctccgtgatgcatgaggctctgcacaac
cactacacgcagaagagcctctccctgtctccgggtaaatgataa
(amino acids)
(SEQ ID NO: 287)
EPKSCDKTHTCPPCPAPELLGGPSVFLFPPKPKDTLMISRTPEVTCVVVDVSHEDPEVKFNWYVDGV
EVHNAKTKPREEQYNSTYRVVSVLTVLHQDWLNGKEYKCKVSNKALPAPIEKTISKAKGQPREPQVY
TLPPSREEMTKNQVRLTCRVKGFYPSDIAVEWESNGQPENNYKTTPPVLDSDGSFFLYSKLTVDKSR
WQQGNVFSCSVMHEALHNHYTQKSLSLSPGK**
Human IgG1 Fc hingeless sequence:
(DNA)
(SEQ ID NO: 288)
gcacctgaactcctggggggaccgtcagtcttcctcttccccccaaaacccaaggacaccctcatgatctccc
ggacccctgaggtcacatgcgtggtggtggacgtgagccacgaagaccctgaggtcaagttcaactggtacgt
ggacggcgtggaggtgcataatgccaagacaaagccgcgggaggagcagtacaacagcacgtaccgtgtggtc
agcgtcctcaccgtcctgcaccaggactggctgaatggcaaggagtacaagtgcaaggtctccaacaaagccc
tcccagcccccatcgagaaaaccatctccaaagccaaagggcagccccgagaaccacaggtgtacaccctgcc
cccatcccgggaggagatgaccaagaaccaggtcagcctgacctgcctggtcaaaggcttctatcccagcgac
atcgccgtggagtgggagagcaatgggcagccggagaacaactacaagaccacgcctcccgtgctggactccg
acggctccttcttcctctacagcaagctcaccgtggacaagagcaggtggcagcaggggaacgtcttctcatg
ctccgtgatgcatgaggctctgcacaaccactacacgcagaagagcctctccctgtctccgggtaaatgataa
(amino acids)
(SEQ ID NO: 289)
APELLGGPSVFLFPPKPKDTLMISRTPEVTCVVVDVSHEDPEVKFNWYVDGVEVHNAKTKPREEQYNSTYRVV
SVLTVLHQDWLNGKEYKCKVSNKALPAPIEKTISKAKGQPREPQVYTLPPSREEMTKNQVSLTCLVKGFYPSD
IAVEWESNGQPENNYKTTPPVLDSDGSFFLYSKLTVDKSRWQQGNVFSCSVMHEALHNHYTQKSLSLSPGK**
Human IgG1 G237A FC sequence:
(DNA)
(SEQ ID NO: 290)
gagcccaaatcttgtgacaaaactcacacatgcccaccgtgcccagcacctgaactcctgggggccc
cgtcagtcttcctcttccccccaaaacccaaggacaccctcatgatctcccggacccctgaggtcac
atgcgtggtggtggacgtgagccacgaagaccctgaggtcaagttcaactggtacgtggacggcgtg
gaggtgcataatgccaagacaaagccgcgggaggagcagtacaacagcacgtaccgtgtggtcagcg
tcctcaccgtcctgcaccaggactggctgaatggcaaggagtacaagtgcaaggtctccaacaaagc
cctcccagcccccatcgagaaaaccatctccaaagccaaagggcagccccgagaaccacaggtgtac
accctgcccccatcccgggaggagatgaccaagaaccaggtcagcctgacctgcctggtcaaaggct
tctatcccagcgacatcgccgtggagtgggagagcaatgggcagccggagaacaactacaagaccac
gcctcccgtgctggactccgacggctccttcttcctctacagcaagctcaccgtggacaagagcagg
tggcagcaggggaacgtcttctcatgctccgtgatgcatgaggctctgcacaaccactacacgcaga
agagcctctccctgtctccgggtaaa
(amino acids)
(SEQ ID NO: 291)
EPKSCDKTHTCPPCPAPELLGAPSVFLFPPKPKDTLMISRTPEVTCVVVDVSHEDPEVKFNWYVDGV
EVHNAKTKPREEQYNSTYRVVSVLTVLHQDWLNGKEYKCKVSNKALPAPIEKTISKAKGQPREPQVY
TLPPSREEMTKNQVSLTCLVKGFYPSDIAVEWESNGQPENNYKTTPPVLDSDGSFFLYSKLTVDKSR
WQQGNVFSCSVMHEALHNHYTQKSLSLSPGK
Human IgG1 L234A/L235A FC sequence:
(DNA)
(SEQ ID NO: 292)
gagcccaaatcttgtgacaaaactcacacatgcccaccgtgcccagcacctgaagccgccgggggac
cgtcagtcttcctcttccccccaaaacccaaggacaccctcatgatctcccggacccctgaggtcac
atgcgtggtggtggacgtgagccacgaagaccctgaggtcaagttcaactggtacgtggacggcgtg
gaggtgcataatgccaagacaaagccgcgggaggagcagtacaacagcacgtaccgtgtggtcagcg
tcctcaccgtcctgcaccaggactggctgaatggcaaggagtacaagtgcaaggtctccaacaaagc
cctcccagcccccatcgagaaaaccatctccaaagccaaagggcagccccgagaaccacaggtgtac
accctgcccccatcccgggaggagatgaccaagaaccaggtcagcctgacctgcctggtcaaaggct
tctatcccagcgacatcgccgtggagtgggagagcaatgggcagccggagaacaactacaagaccac
gcctcccgtgctggactccgacggctccttcttcctctacagcaagctcaccgtggacaagagcagg
tggcagcaggggaacgtcttctcatgctccgtgatgcatgaggctctgcacaaccactacacgcaga
agagcctctccctgtctccgggtaaa
(amino acids)
(SEQ ID NO: 293)
EPKSCDKTHTCPPCPAPEAAGGPSVFLFPPKPKDTLMISRTPEVTCVVVDVSHEDPEVKFNWYVDGV
EVHNAKTKPREEQYNSTYRVVSVLTVLHQDWLNGKEYKCKVSNKALPAPIEKTISKAKGQPREPQVY
TLPPSREEMTKNQVSLTCLVKGFYPSDIAVEWESNGQPENNYKTTPPVLDSDGSFFLYSKLTVDKSR
WQQGNVFSCSVMHEALHNHYTQKSLSLSPGK
CAR-T E6 CD3z sequence:
(DNA)
(SEQ ID NO: 294)
atggccctgcccgtgaccgctttgctgctccccctggcgctgctgctgcacgccgccaggccagagg
tccagctggttgagagtggcggtgggctggttaagcctggcggctccctgcggctgagctgcgccgc
gagtggatttactttcagccgatatgggatgagttgggtgcggcaagctcccgggaagaggctggaa
tgggtctcaacaatctccggggggggcacttacatctattaccccgactcagtcaaggggagattta
ccatttcacgagacaacgctaagaataccctgtatttgcagatgaattctctgagagcagaggacac
agctgtttactattgtacccgcgacaactatggcaggaactacgactacggtatggactattgggga
caagggacattggttacagtgagcagtggcggcgggggcagcggaggaggaggcagcggtggggggg
gcagcgagatagtgctcacgcagtcacccgcgactctcagtctctcacctggggaacgagctaccct
gacgtgctctgctacctcctcagtgtcatatattcactggtatcagcaacggcccgggcagtcccct
agattgctcatttatagtacctctaatctggcctcaggtatccctgcacgattttctggatctggtt
caggttctgattacaccctcactatctctagcctggagcctgaagactttgccgtttattactgcca
gcagaggtctagctccccattcacctttgggagtgggaccaaggttgaaattaaaacgacaaccccg
gcccccagaccaccaacgccagcccccaccatcgccagccaacccctgtctctgagaccagaagcct
gtaggcctgccgccggtggagctgtgcacacaagaggactggatttcgcctgtgatatctacatttg
ggccccgctcgcaggcacatgtggagtgctcctcctctccctggtgattaccctgtactgccgcgtt
aagttctcccgatcagccgacgcgcctgcttacaagcagggccagaaccaactgtacaacgagctga
atctcggtagacgggaagagtacgacgtgttggacaaacggagaggccgcgacccagaaatgggcgg
caagcctcgcaggaaaaacccccaggagggactgtacaatgagttgcagaaagataagatggcagaa
gcttatagcgagatcggaatgaagggggaaaggagacgagggaaaggacacgacggcctttatcagg
gcctgtccacagcaacaaaagatacgtatgacgccctccatatgcaggcacttccaccacggtgata
a
(amino acids)
(SEQ ID NO: 295)
MALPVTALLLPLALLLHAARPEVQLVESGGGLVKPGGSLRLSCAASGFTFSRYGMSWVRQAPGKRLE
WVSTISGGGTYIYYPDSVKGRFTISRDNAKNTLYLQMNSLRAEDTAVYYCTRDNYGRNYDYGMDYWG
QGTLVTVSSGGGGSGGGGSGGGGSEIVLTQSPATLSLSPGERATLTCSATSSVSYIHWYQQRPGQSP
RLLIYSTSNLASGIPARFSGSGSGSDYTLTISSLEPEDFAVYYCQQRSSSPFTFGSGTKVEIKTTTP
APRPPTPAPTIASQPLSLRPEACRPAAGGAVHTRGLDFACDIYIWAPLAGTCGVLLLSLVITLYCRV
KFSRSADAPAYKQGQNQLYNELNLGRREEYDVLDKRRGRDPEMGGKPRRKNPQEGLYNELQKDKMAE
AYSEIGMKGERRRGKGHDGLYQGLSTATKDTYDALHMQALPPR**
**
CAR-T E6 CD3z gBLOCK sequence:
(DNA)
(SEQ ID NO: 296)
tggagctgtgcacacaagaggactggatttcgcctgtgatatctacatttgggccccgctcgcaggcacatgt
ggagtgctcctcctctccctggtgattaccctgtactgccgcgttaagttctcccgatcagccgacgcgcctg
cttacaagcagggccagaaccaactgtacaacgagctgaatctcggtagacgggaagagtacgacgtgttgga
caaacggagaggccgcgacccagaaatgggcggcaagcctcgcaggaaaaacccccaggagggactgtacaat
gagttgcagaaagataagatggcagaagcttatagcgagatcggaatgaagggggaaaggagacgagggaaag
gacacgacggcctttatcagggcctgtccacagcaacaaaagatacgtatgacgccctccatatgcaggcact
tccaccacggtgataagtttaaacccgctgatcagcctcgactgtgc
CAR-T E6 CD28/CD3z sequence:
(DNA)
(SEQ ID NO: 297)
atggccctgcccgtgaccgctttgctgctccccctggcgctgctgctgcacgccgccaggccagagg
tccagctggttgagagtggcggtgggctggttaagcctggcggctccctgcggctgagctgcgccgc
gagtggatttactttcagccgatatgggatgagttgggtgcggcaagctcccgggaagaggctggaa
tgggtctcaacaatctccggggggggcacttacatctattaccccgactcagtcaaggggagattta
ccatttcacgagacaacgctaagaataccctgtatttgcagatgaattctctgagagcagaggacac
agctgtttactattgtacccgcgacaactatggcaggaactacgactacggtatggactattgggga
caagggacattggttacagtgagcagtggcggcgggggcagcggaggaggaggcagcggtggggggg
gcagcgagatagtgctcacgcagtcacccgcgactctcagtctctcacctggggaacgagctaccct
gacgtgctctgctacctcctcagtgtcatatattcactggtatcagcaacggcccgggcagtcccct
agattgctcatttatagtacctctaatctggcctcaggtatccctgcacgattttctggatctggtt
caggttctgattacaccctcactatctctagcctggagcctgaagactttgccgtttattactgcca
gcagaggtctagctccccattcacctttgggagtgggaccaaggttgaaattaaaacgacaaccccg
gcccccagaccaccaacgccagcccccaccatcgccagccaacccctgtctctgagaccagaagcct
gtaggcctgccgccggtggagctgtgcacacaagaggactggatttcgcctgtgatatctacatttg
ggccccgctcgcaggcacatgtggagtgctcctcctctccctggtgattaccctgtactgcagaagc
aagcggtctcggctcctgcattctgattacatgaacatgaccccaagaagaccaggccccaccagga
aacattaccagccctacgctccgccacgcgacttcgctgcctaccggtcccgcgttaagttctcccg
atcagccgacgcgcctgcttacaagcagggccagaaccaactgtacaacgagctgaatctcggtaga
cgggaagagtacgacgtgttggacaaacggagaggccgcgacccagaaatgggcggcaagcctcgca
ggaaaaacccccaggagggactgtacaatgagttgcagaaagataagatggcagaagcttatagcga
gatcggaatgaagggggaaaggagacgagggaaaggacacgacggcctttatcagggcctgtccaca
gcaacaaaagatacgtatgacgccctccatatgcaggcacttccaccacggtgataa
(amino acids)
(SEQ ID NO: 298)
MALPVTALLLPLALLLHAARPEVQLVESGGGLVKPGGSLRLSCAASGFTFSRYGMSWVRQAPGKRLE
WVSTISGGGTYIYYPDSVKGRFTISRDNAKNTLYLQMNSLRAEDTAVYYCTRDNYGRNYDYGMDYWG
QGTLVTVSSGGGGSGGGGSGGGGSEIVLTQSPATLSLSPGERATLTCSATSSVSYIHWYQQRPGQSP
RLLIYSTSNLASGIPARFSGSGSGSDYTLTISSLEPEDFAVYYCQQRSSSPFTFGSGTKVEIKTTTP
APRPPTPAPTIASQPLSLRPEACRPAAGGAVHTRGLDFACDIYIWAPLAGTCGVLLLSLVITLYCRS
KRSRLLHSDYMNMTPRRPGPTRKHYQPYAPPRDFAAYRSRVKFSRSADAPAYKQGQNQLYNELNLGR
REEYDVLDKRRGRDPEMGGKPRRKNPQEGLYNELQKDKMAEAYSEIGMKGERRRGKGHDGLYQGLST
ATKDTYDALHMQALPPR**
CAR-T E6 CD28/CD3z g BLOCK sequence:
(DNA)
(SEQ ID NO: 299)
tggagctgtgcacacaagaggactggatttcgcctgtgatatctacatttgggccccgctcgcaggcacatgt
ggagtgctcctcctctccctggtgattaccctgtactgcagaagcaagcggtctcggctcctgcattctgatt
acatgaacatgaccccaagaagaccaggccccaccaggaaacattaccagccctacgctccgccacgcgactt
cgctgcctaccggtcccgcgttaagttctcccgatcagccgacgcgcctgcttacaagcagggccagaaccaa
ctgtacaacgagctgaatctcggtagacgggaagagtacgacgtgttggacaaacggagaggccgcgacccag
aaatgggcggcaagcctcgcaggaaaaacccccaggagggactgtacaatgagttgcagaaagataagatggc
agaagcttatagcgagatcggaatgaagggggaaaggagacgagggaaaggacacgacggcctttatcagggc
ctgtccacagcaacaaaagatacgtatgacgccctccatatgcaggcacttccaccacggtgataagtttaaa
cccgctgatcagcctcgactgtgc
CAR-T E6 4-1BB/CD3z sequence:
(DNA)
(SEQ ID NO: 300)
atggccctgcccgtgaccgctttgctgctccccctggcgctgctgctgcacgccgccaggccagagg
tccagctggttgagagtggcggtgggctggttaagcctggcggctccctgcggctgagctgcgccgc
gagtggatttactttcagccgatatgggatgagttgggtgcggcaagctcccgggaagaggctggaa
tgggtctcaacaatctccggggggggcacttacatctattaccccgactcagtcaaggggagattta
ccatttcacgagacaacgctaagaataccctgtatttgcagatgaattctctgagagcagaggacac
agctgtttactattgtacccgcgacaactatggcaggaactacgactacggtatggactattgggga
caagggacattggttacagtgagcagtggcggcgggggcagcggaggaggaggcagcggtggggggg
gcagcgagatagtgctcacgcagtcacccgcgactctcagtctctcacctggggaacgagctaccct
gacgtgctctgctacctcctcagtgtcatatattcactggtatcagcaacggcccgggcagtcccct
agattgctcatttatagtacctctaatctggcctcaggtatccctgcacgattttctggatctggtt
caggttctgattacaccctcactatctctagcctggagcctgaagactttgccgtttattactgcca
gcagaggtctagctccccattcacctttgggagtgggaccaaggttgaaattaaaacgacaaccccg
gcccccagaccaccaacgccagcccccaccatcgccagccaacccctgtctctgagaccagaagcct
gtaggcctgccgccggtggagctgtgcacacaagaggactggatttcgcctgtgatatctacatttg
ggccccgctcgcaggcacatgtggagtgctcctcctctccctggtgattaccctgtactgcaaaagg
ggccgcaaaaaactcctttacatttttaagcagccttttatgaggccagtacagacgactcaagagg
aagacgggtgctcatgccgctttcctgaggaggaggaaggagggtgcgaactgcgcgttaagttctc
ccgatcagccgacgcgcctgcttacaagcagggccagaaccaactgtacaacgagctgaatctcggt
agacgggaagagtacgacgtgttggacaaacggagaggccgcgacccagaaatgggcggcaagcctc
gcaggaaaaacccccaggagggactgtacaatgagttgcagaaagataagatggcagaagcttatag
cgagatcggaatgaagggggaaaggagacgagggaaaggacacgacggcctttatcagggcctgtcc
acagcaacaaaagatacgtatgacgccctccatatgcaggcacttccaccacggtgataa
(amino acids)
(SEQ ID NO: 301)
MALPVTALLLPLALLLHAARPEVQLVESGGGLVKPGGSLRLSCAASGFTFSRYGMSWVRQAPGKRLEWVSTIS
GGGTYIYYPDSVKGRFTISRDNAKNTLYLQMNSLRAEDTAVYYCTRDNYGRNYDYGMDYWGQGTLVTVSSGGG
GSGGGGSGGGGSEIVLTQSPATLSLSPGERATLTCSATSSVSYIHWYQQRPGQSPRLLIYSTSNLASGIPARF
SGSGSGSDYTLTISSLEPEDFAVYYCQQRSSSPFTFGSGTKVEIKTTTPAPRPPTPAPTIASQPLSLRPEACR
PAAGGAVHTRGLDFACDIYIWAPLAGTCGVLLLSLVITLYCKRGRKKLLYIFKQPFMRPVQTTQEEDGCSCRF
PEEEEGGCELRVKFSRSADAPAYKQGQNQLYNELNLGRREEYDVLDKRRGRDPEMGGKPRRKNPQEGLYNELQ
KDKMAEAYSEIGMKGERRRGKGHDGLYQGLSTATKDTYDALHMQALPPR**
CAR-T E6 4-1BB/CD3z gBLOCK sequence:
(DNA)
(SEQ ID NO: 302)
tggagctgtgcacacaagaggactggatttcgcctgtgatatctacatttgggccccgctcgcaggcacatgt
ggagtgctcctcctctccctggtgattaccctgtactgcaaaaggggccgcaaaaaactcctttacattttta
agcagccttttatgaggccagtacagacgactcaagaggaagacgggtgctcatgccgctttcctgaggagga
ggaaggagggtgcgaactgcgcgttaagttctcccgatcagccgacgcgcctgcttacaagcagggccagaac
caactgtacaacgagctgaatctcggtagacgggaagagtacgacgtgttggacaaacggagaggccgcgacc
cagaaatgggcggcaagcctcgcaggaaaaacccccaggagggactgtacaatgagttgcagaaagataagat
ggcagaagcttatagcgagatcggaatgaagggggaaaggagacgagggaaaggacacgacggcctttatcag
ggcctgtccacagcaacaaaagatacgtatgacgccctccatatgcaggcacttccaccacggtgataagttt
aaacccgctgatcagcctcgactgtgc
CAR-T E6 CD28/4-1BB/CD3z sequence:
(DNA)
(SEQ ID NO: 303)
atggccctgcccgtgaccgctttgctgctccccctggcgctgctgctgcacgccgccaggccagagg
tccagctggttgagagtggcggtgggctggttaagcctggcggctccctgcggctgagctgcgccgc
gagtggatttactttcagccgatatgggatgagttgggtgcggcaagctcccgggaagaggctggaa
tgggtctcaacaatctccggggggggcacttacatctattaccccgactcagtcaaggggagattta
ccatttcacgagacaacgctaagaataccctgtatttgcagatgaattctctgagagcagaggacac
agctgtttactattgtacccgcgacaactatggcaggaactacgactacggtatggactattgggga
caagggacattggttacagtgagcagtggcggcgggggcagcggaggaggaggcagcggtggggggg
gcagcgagatagtgctcacgcagtcacccgcgactctcagtctctcacctggggaacgagctaccct
gacgtgctctgctacctcctcagtgtcatatattcactggtatcagcaacggcccgggcagtcccct
agattgctcatttatagtacctctaatctggcctcaggtatccctgcacgattttctggatctggtt
caggttctgattacaccctcactatctctagcctggagcctgaagactttgccgtttattactgcca
gcagaggtctagctccccattcacctttgggagtgggaccaaggttgaaattaaaacgacaaccccg
gcccccagaccaccaacgccagcccccaccatcgccagccaacccctgtctctgagaccagaagcct
gtaggcctgccgccggtggagctgtgcacacaagaggactggatttcgcctgtgatatctacatttg
ggccccgctcgcaggcacatgtggagtgctcctcctctccctggtgattaccctgtactgcagaagc
aagcggtctcggctcctgcattctgattacatgaacatgaccccaagaagaccaggccccaccagga
aacattaccagccctacgctccgccacgcgacttcgctgcctaccggtccaaaaggggccgcaaaaa
actcctttacatttttaagcagccttttatgaggccagtacagacgactcaagaggaagacgggtgc
tcatgccgctttcctgaggaggaggaaggagggtgcgaactgcgcgttaagttctcccgatcagccg
acgcgcctgcttacaagcagggccagaaccaactgtacaacgagctgaatctcggtagacgggaaga
gtacgacgtgttggacaaacggagaggccgcgacccagaaatgggcggcaagcctcgcaggaaaaac
ccccaggagggactgtacaatgagttgcagaaagataagatggcagaagcttatagcgagatcggaa
tgaagggggaaaggagacgagggaaaggacacgacggcctttatcagggcctgtccacagcaacaaa
agatacgtatgacgccctccatatgcaggcacttccaccacggtgataa
(amino acids)
(SEQ ID NO: 304)
MALPVTALLLPLALLLHAARPEVQLVESGGGLVKPGGSLRLSCAASGFTFSRYGMSWVRQAPGKRLEWVSTIS
GGGTYIYYPDSVKGRFTISRDNAKNTLYLQMNSLRAEDTAVYYCTRDNYGRNYDYGMDYWGQGTLVTVSSGGG
GSGGGGSGGGGSEIVLTQSPATLSLSPGERATLTCSATSSVSYIHWYQQRPGQSPRLLIYSTSNLASGIPARF
SGSGSGSDYTLTISSLEPEDFAVYYCQQRSSSPFTFGSGTKVEIKTTTPAPRPPTPAPTIASQPLSLRPEACR
PAAGGAVHTRGLDFACDIYIWAPLAGTCGVLLLSLVITLYCRSKRSRLLHSDYMNMTPRRPGPTRKHYQPYAP
PRDFAAYRSKRGRKKLLYIFKQPFMRPVQTTQEEDGCSCRFPEEEEGGCELRVKFSRSADAPAYKQGQNQLYN
ELNLGRREEYDVLDKRRGRDPEMGGKPRRKNPQEGLYNELQKDKMAEAYSEIGMKGERRRGKGHDGLYQGLST
ATKDTYDALHMQALPPR**
CAR-T E6 CD28/4-1BB/CD3z gBLOCK sequence:
(DNA)
(SEQ ID NO: 305)
atagggagacccaagctggctagttaagcttggtaccgagggccaccatggccctgcccgtgaccgc
tttgctgctccccctggcgctgctgctgcacgccgccaggccagaggtccagctggttgagagtggc
ggtgggctggttaagcctggcggctccctgcggctgagctgcgccgcgagtggatttactttcagcc
gatatgggatgagttgggtgcggcaagctcccgggaagaggctggaatgggtctcaacaatctccgg
ggggggcacttacatctattaccccgactcagtcaaggggagatttaccatttcacgagacaacgct
aagaataccctgtatttgcagatgaattctctgagagcagaggacacagctgtttactattgtaccc
gcgacaactatggcaggaactacgactacggtatggactattggggacaagggacattggttacagt
gagcagtggcggcgggggcagcggaggaggaggcagcggtggggggggcagcgagatagtgctcacg
cagtcacccgcgactctcagtctctcacctggggaacgagctaccctgacgtgctctgctacctcct
cagtgtcatatattcactggtatcagcaacggcccgggcagtcccctagattgctcatttatagtac
ctctaatctggcctcaggtatccctgcacgattttctggatctggttcaggttctgattacaccctc
actatctctagcctggagcctgaagactttgccgtttattactgccagcagaggtctagctccccat
tcacctttgggagtgggaccaaggttgaaattaaaacgacaaccccggcccccagaccaccaacgcc
agcccccaccatcgccagccaacccctgtctctgagaccagaagcctgtaggcctgccgccggtgga
gctgtgcacacaagaggactggatttcgcctgtgatatctacatttgggccccgctcgcaggcacat
gtggagtgctcctcctctccctggtgattaccctgtactgcagaagcaagcggtctcggctcctgca
ttctgattacatgaacatgaccccaagaagaccaggccccaccaggaaacattaccagccctacgct
ccgccacgcgacttcgctgcctaccggtccaaaaggggccgcaaaaaactcctttacatttttaagc
agccttttatgaggccagtacagacgactcaagaggaagacgggtgctcatgccgctttcctgagga
ggaggaaggagggtgcgaactgcgcgttaagttctcccgatcagccgacgcgcctgcttacaagcag
ggccagaaccaactgtacaacgagctgaatctcggtagacgggaagagtacgacgtgttggacaaac
ggagaggccgcgacccagaaatgggcggcaagcctcgcaggaaaaacccccaggagggactgtacaa
tgagttgcagaaagataagatggcagaagcttatagcgagatcggaatgaagggggaaaggagacga
gggaaaggacacgacggcctttatcagggcctgtccacagcaacaaaagatacgtatgacgccctcc
atatgcaggcacttccaccacggtgataagtttaaacccgctgatcagcctcgactgtgc
CAR-T C2 CD28/4-1BB/CD3z sequence:
(DNA)
(SEQ ID NO: 306)
atggccttgccagtgacggccctgctgctgccattggctcttctgttgcacgctgccaggcctgaagtgcagc
tcgtagagagtggcgggggactggtgaagcccggtggaagcctcagactcagttgcgccgcctcaggtttcac
tttttcaggttacgccatgtcctgggtaagacaggcaccggggaaaggactcgagtgggtgtctactatcagc
tcaggaggcacttatatatattatcctgactctgtaaaaggccgatttacgatttctcgcgacaatgcaaaga
actccctctacctccaaatgaacagtcttagggcagaagacactgctgtatactattgtgcacgcctoggcgg
cgacaactactacgagtactttgacgtgtgggggaaagggactaccgtgacagtttcaagoggaggaggtggc
tcaggtggaggcgggtcaggggggggaggaagtgatattgtgctcacacaatccccagcctccctggctgtgt
ctccoggccaacgcgctacaattacatgtcgggcctccaaaagcgtgagcaccagcggctacagctacatgca
ctggtatcaacagaaaccaggacaaccccccaaactgttgatttatctcgcttcaaacttggagtccggcgtg
cctgcgcgcttttcagggagtgggagcggcacagattttacgctgactatcaaccccgtagaagcaaacgata
cagcgaattattattgtcaacattcccgggaactcccctttacgttcggcgggggcacaaaggtcgaaattaa
gagaaccacgacaaccccggcccccagaccaccaacgccagcccccaccatcgccagccaacccctgtctctg
agaccagaagcctgtaggcctgccgccggtggagctgtgcacacaagaggactggatttcgcctgtgatatct
acatttgggccccgctcgcaggcacatgtggagtgctcctcctctccctggtgattaccctgtactgcagaag
caagcggtctcggctcctgcattctgattacatgaacatgaccccaagaagaccaggccccaccaggaaacat
taccagccctacgctccgccacgcgacttcgctgcctaccggtccaaaaggggccgcaaaaaactcctttaca
tttttaagcagccttttatgaggccagtacagacgactcaagaggaagacgggtgctcatgccgctttcctga
ggaggaggaaggagggtgcgaactgcgcgttaagttctcccgatcagccgacgcgcctgcttacaagcagggc
cagaaccaactgtacaacgagctgaatctcggtagacgggaagagtacgacgtgttggacaaacggagaggcc
gcgacccagaaatgggcggcaagcctcgcaggaaaaacccccaggagggactgtacaatgagttgcagaaaga
taagatggcagaagcttatagcgagatcggaatgaagggggaaaggagacgagggaaaggacacgacggcctt
tatcagggcctgtccacagcaacaaaagatacgtatgacgccctccatatgcaggcacttccaccacggtgat
aa
(amino acids)
(SEQ ID NO: 307)
EVQLVESGGGLVKPGGSLRLSCAASGFTFSGYAMSWVRQAPGKGLEWVSTISSGGTYIYYPDSVKGRFTISRD
NAKNSLYLQMNSLRAEDTAVYYCARLGGDNYYEYFDVWGKGTTVTVSSGGGGSGGGGSGGGGSDIVLTQSPAS
LAVSPGQRATITCRASKSVSTSGYSYMHWYQQKPGQPPKLLIYLASNLESGVPARFSGSGSGTDFTLTINPVE
ANDTANYYCQHSRELPFTFGGGTKVEIKRTTTTPAPRPPTPAPTIASQPLSLRPEACRPAAGGAVHTRGLDFA
CDIYIWAPLAGTCGVLLLSLVITLYCRSKRSRLLHSDYMNMTPRRPGPTRKHYQPYAPPRDFAAYRSKRGRKK
LLYIFKQPFMRPVQTTQEEDGCSCRFPEEEEGGCELRVKFSRSADAPAYKQGQNQLYNELNLGRREEYDVLDK
RRGRDPEMGGKPRRKNPQEGLYNELQKDKMAEAYSEIGMKGERRRGKGHDGLYQGLSTATKDTYDALHMQALP
PR**
CAR-T C2-1 gBLOCK sequence:
(DNA)
(SEQ ID NO: 308)
atagggagacccaagctggctagttaagcttggtaccgagggccaccatggccttgccagtgacggccctgct
gctgccattggctcttctgttgcacgctgccaggcctgaagtgcagctcgtagagagtggcgggggactggtg
aagcccggtggaagcctcagactcagttgcgccgcctcaggtttcactttttcaggttacgccatgtcctggg
taagacaggcaccggggaaaggactcgagtgggtgtctactatcagctcaggaggcacttatatatattatcc
tgactctgtaaaaggccgatttacgatttctcgcgacaatgcaaagaactccctctacctccaaatgaacagt
cttagggcagaagacactgctgtatactattgtgcacgcctcggcggcgacaactactacgagtactttgacg
tgtgggggaaagggactaccgtgacagtttcaagcggaggaggtggctcaggtggaggcgggtcagggggggg
aggaagtgatattgtgctcacacaatccccagcctccctggc
CAR-T C2-2 gBLOCK sequence:
(DNA)
(SEQ ID NO: 309)
aagtgatattgtgctcacacaatccccagcctccctggctgtgtctcccggccaacgcgctacaattacatgt
cgggcctccaaaagcgtgagcaccagcggctacagctacatgcactggtatcaacagaaaccaggacaacccc
ccaaactgttgatttatctcgcttcaaacttggagtccggcgtgcctgcgcgcttttcagggagtgggagcgg
cacagattttacgctgactatcaaccccgtagaagcaaacgatacagcgaattattattgtcaacattcccgg
gaactcccctttacgttcggcgggggcacaaaggtcgaaattaagagaaccacgacaaccccggcccccagac
caccaacgccagcccccaccatcgccagccaacccctgtctctgagaccagaagcctgtaggcctgccgccgg
tggagctgtgcacacaagaggactggatttcgcctgtgatatctacatttgggccccgctcgcaggcacatgt
ggagtgc
CAR E6 Fc/8/4-1BB/CD3z sequence:
(DNA)
(SEQ ID NO: 310)
atggccctgcccgtgaccgctttgctgctccccctggcgctgctgctgcacgccgccaggccagagg
tccagctggttgagagtggcggtgggctggttaagcctggcggctccctgcggctgagctgcgccgc
gagtggatttactttcagccgatatgggatgagttgggtgcggcaagctcccgggaagaggctggaa
tgggtctcaacaatctccggggggggcacttacatctattaccccgactcagtcaaggggagattta
ccatttcacgagacaacgctaagaataccctgtatttgcagatgaattctctgagagcagaggacac
agctgtttactattgtacccgcgacaactatggcaggaactacgactacggtatggactattgggga
caagggacattggttacagtgagcagtggcggcgggggcagcggaggaggaggcagcggtggcggag
gcagcgagatagtgctcacgcagtcacccgcgactctcagtctctcacctggggaacgagctaccct
gacgtgctctgctacctcctcagtgtcatatattcactggtatcagcaacggcccgggcagtcccct
agattgctcatttatagtacctctaatctggcctcaggtatccctgcacgattttctggatctggtt
caggttctgattacaccctcactatctctagcctggagcctgaagactttgccgtttattactgcca
gcagaggtctagctccccattcacctttgggagtgggaccaaggttgaaattaaagagcccaaatct
tgtgacaaaactcacacatgcccaccgtgcccagcacctgaactcctggggggaccgtcagtcttcc
tcttccccccaaaacccaaggacaccctcatgatctcccggacccctgaggtcacatgcgtggtggt
ggacgtgagccacgaagaccctgaggtcaagttcaactggtacgtggacggcgtggaggtgcataat
gccaagacaaagccgcgggaggagcagtacaacagcacgtaccgtgtggtcagcgtcctcaccgtcc
tgcaccaggactggctgaatggcaaggagtacaagtgcaaggtctccaacaaagccctcccagcccc
catcgagaaaaccatctccaaagccaaagggcagccccgagaaccacaggtgtacaccctgccccca
tcccgggaggagatgaccaagaaccaggtcagcctgacctgcctggtcaaaggcttctatcccagcg
acatcgccgtggagtgggagagcaatgggcagccggagaacaactacaagaccacgcctcccgtgct
ggactccgacggctccttcttcctctacagcaagctcaccgtggacaagagcaggtggcagcagggg
aacgtcttctcatgctccgtgatgcatgaggctctgcacaaccactacacgcagaagagcctctccc
tgtctccgggtaaaatctacatttgggccccgctcgcaggcacatgtggagtgctcctcctctccct
ggtgattaccctgtactgcaaaaggggccgcaaaaaactcctttacatttttaagcagccttttatg
aggccagtacagacgactcaagaggaagacgggtgctcatgccgctttcctgaggaggaggaaggag
ggtgcgaactgcgcgttaagttctcccgatcagccgacgcgcctgcttacaagcagggccagaacca
actgtacaacgagctgaatctcggtagacgggaagagtacgacgtgttggacaaacggagaggccgc
gacccagaaatgggcggcaagcctcgcaggaaaaacccccaggagggactgtacaatgagttgcaga
aagataagatggcagaagcttatagcgagatcggaatgaagggggaaaggagacgagggaaaggaca
cgacggcctttatcagggcctgtccacagcaacaaaagatacgtatgacgccctccatatgcaggca
cttccaccacggtgataa
(amino acids)
(SEQ ID NO: 311)
MALPVTALLLPLALLLHAARPEVQLVESGGGLVKPGGSLRLSCAASGFTFSRYGMSWVRQAPGKRLE
WVSTISGGGTYIYYPDSVKGRFTISRDNAKNTLYLQMNSLRAEDTAVYYCTRDNYGRNYDYGMDYWG
QGTLVTVSSGGGGSGGGGSGGGGSEIVLTQSPATLSLSPGERATLTCSATSSVSYIHWYQQRPGQSP
RLLIYSTSNLASGIPARFSGSGSGSDYTLTISSLEPEDFAVYYCQQRSSSPFTFGSGTKVEIKEPKS
CDKTHTCPPCPAPELLGGPSVFLFPPKPKDTLMISRTPEVTCVVVDVSHEDPEVKFNWYVDGVEVHN
AKTKPREEQYNSTYRVVSVLTVLHQDWLNGKEYKCKVSNKALPAPIEKTISKAKGQPREPQVYTLPP
SREEMTKNQVSLTCLVKGFYPSDIAVEWESNGQPENNYKTTPPVLDSDGSFFLYSKLTVDKSRWQQG
NVFSCSVMHEALHNHYTQKSLSLSPGKIYIWAPLAGTCGVLLLSLVITLYCKRGRKKLLYIFKQPFM
RPVQTTQEEDGCSCRFPEEEEGGCELRVKFSRSADAPAYKQGQNQLYNELNLGRREEYDVLDKRRGR
DPEMGGKPRRKNPQEGLYNELQKDKMAEAYSEIGMKGERRRGKGHDGLYQGLSTATKDTYDALHMQA
LPPR**
E6 CAR pCDH gBLOCK sequence:
(DNA)
(SEQ ID NO: 312)
acgctgttttgacctccatagaagattctagagctagctgtagagcttggtaccgagggccaccatg
gccctgcccgtgaccgctttgctgctccccctggcgctgctgctgcacgccgccaggccagaggtcc
agctggttgagagtggcggtgggctggttaagcctggcggctccctgcggctgagctgcgccgcgag
tggatttactttcagccgatatgggatgagttgggtgcggcaagctcccgggaagaggctggaatgg
gtctcaacaatctccggggggggcacttacatctattaccccgactcagtcaaggggagatttacca
tttcacgagacaacgctaagaataccctgtatttgcagatgaattctctgagagcagaggacacagc
tgtttactattgtacccgcgacaactatggcaggaactacgactacggtatggactattggggacaa
gggacattggttacagtgagcagtggcggcgggggcagcggaggaggaggcagcggtggcggaggca
gcgagatagtgctcacgcagtcacccgcgactctcagtctctcacctggggaacgagctaccctgac
gtgctctgctacctcctcagtgtcatatattcactggtatcagcaacggcccgggcagtcccctaga
ttgctcatttatagtacctctaatctggcctcaggtatccctgc
E6 CAR Fc pCDH gBLOCK sequence:
(DNA)
(SEQ ID NO: 313)
agtacctctaatctggcctcaggtatccctgcacgattttctggatctggttcaggttctgattaca
ccctcactatctctagcctggagcctgaagactttgccgtttattactgccagcagaggtctagctc
cccattcacctttgggagtgggaccaaggttgaaattaaagagcccaaatcttgtgacaaaactcac
acatgcccaccgtgcccagcacctgaactcctggggggaccgtcagtcttcctcttccccccaaaac
ccaaggacaccctcatgatctcccggacccctgaggtcacatgcgtggtggtggacgtgagccacga
agaccctgaggtcaagttcaactggtacgtggacggcgtggaggtgcataatgccaagacaaagccg
cgggaggagcagtacaacagcacgtaccgtgtggtcagcgtcctcaccgtcctgcaccaggactggc
tgaatggcaaggagtacaagtgcaaggtctccaacaaagccctcccagcccccatcgagaaaaccat
ctccaaagccaaagggcagccccgagaaccacaggtgtacaccctgcccccatcccgggaggagatg
accaagaaccaggtcagcctgacctgcctggtcaaaggcttctatcccagcgacatcgccgtggagt
gggagagcaatgggcagccggagaacaactacaagaccacgcctcccgtgctg
E6 CAR 8BB3 pCDH gBLOCK sequence:
(DNA)
(SEQ ID NO: 314)
agaacaactacaagaccacgcctcccgtgctggactccgacggctccttcttcctctacagcaagct
caccgtggacaagagcaggtggcagcaggggaacgtcttctcatgctccgtgatgcatgaggctctg
cacaaccactacacgcagaagagcctctccctgtctccgggtaaaatctacatttgggccccgctcg
caggcacatgtggagtgctcctcctctccctggtgattaccctgtactgcaaaaggggccgcaaaaa
actcctttacatttttaagcagccttttatgaggccagtacagacgactcaagaggaagacgggtgc
tcatgccgctttcctgaggaggaggaaggagggtgcgaactgcgcgttaagttctcccgatcagccg
acgcgcctgcttacaagcagggccagaaccaactgtacaacgagctgaatctcggtagacgggaaga
gtacgacgtgttggacaaacggagaggccgcgacccagaaatgggcggcaagcctcgcaggaaaaac
ccccaggagggactgtacaatgagttgcagaaagataagatggcagaagcttatagcgagatcggaa
tgaagggggaaaggagacgagggaaaggacacgacggcctttatcagggcctgtccacagcaacaaa
agatacgtatgacgccctccatatgcaggcacttccaccacggtgataagtttaaacccgctgatca
ggcggccgcgaaggatctgcgatcgctccggtgcccgtcag
CAR E6 FcH/8/4-1BB/CD3z sequence:
(DNA)
(SEQ ID NO: 315)
atggccctgcccgtgaccgctttgctgctccccctggcgctgctgctgcacgccgccaggccagagg
tccagctggttgagagtggcggtgggctggttaagcctggcggctccctgcggctgagctgcgccgc
gagtggatttactttcagccgatatgggatgagttgggtgcggcaagctcccgggaagaggctggaa
tgggtctcaacaatctccggggggggcacttacatctattaccccgactcagtcaaggggagattta
ccatttcacgagacaacgctaagaataccctgtatttgcagatgaattctctgagagcagaggacac
agctgtttactattgtacccgcgacaactatggcaggaactacgactacggtatggactattgggga
caagggacattggttacagtgagcagtggcggcgggggcagcggaggaggaggcagcggtggcggag
gcagcgagatagtgctcacgcagtcacccgcgactctcagtctctcacctggggaacgagctaccct
gacgtgctctgctacctcctcagtgtcatatattcactggtatcagcaacggcccgggcagtcccct
agattgctcatttatagtacctctaatctggcctcaggtatccctgcacgattttctggatctggtt
caggttctgattacaccctcactatctctagcctggagcctgaagactttgccgtttattactgcca
gcagaggtctagctccccattcacctttgggagtgggaccaaggttgaaattaaagcacctgaactc
ctggggggaccgtcagtcttcctcttccccccaaaacccaaggacaccctcatgatctcccggaccc
ctgaggtcacatgcgtggtggtggacgtgagccacgaagaccctgaggtcaagttcaactggtacgt
ggacggcgtggaggtgcataatgccaagacaaagccgcgggaggagcagtacaacagcacgtaccgt
gtggtcagcgtcctcaccgtcctgcaccaggactggctgaatggcaaggagtacaagtgcaaggtct
ccaacaaagccctcccagcccccatcgagaaaaccatctccaaagccaaagggcagccccgagaacc
acaggtgtacaccctgcccccatcccgggaggagatgaccaagaaccaggtcagcctgacctgcctg
gtcaaaggcttctatcccagcgacatcgccgtggagtgggagagcaatgggcagccggagaacaact
acaagaccacgcctcccgtgctggactccgacggctccttcttcctctacagcaagctcaccgtgga
caagagcaggtggcagcaggggaacgtcttctcatgctccgtgatgcatgaggctctgcacaaccac
tacacgcagaagagcctctccctgtctccgggtaaaatctacatttgggccccgctcgcaggcacat
gtggagtgctcctcctctccctggtgattaccctgtactgcaaaaggggccgcaaaaaactccttta
catttttaagcagccttttatgaggccagtacagacgactcaagaggaagacgggtgctcatgccgc
tttcctgaggaggaggaaggagggtgcgaactgcgcgttaagttctcccgatcagccgacgcgcctg
cttacaagcagggccagaaccaactgtacaacgagctgaatctcggtagacgggaagagtacgacgt
gttggacaaacggagaggccgcgacccagaaatgggcggcaagcctcgcaggaaaaacccccaggag
ggactgtacaatgagttgcagaaagataagatggcagaagcttatagcgagatcggaatgaaggggg
aaaggagacgagggaaaggacacgacggcctttatcagggcctgtccacagcaacaaaagatacgta
tgacgccctccatatgcaggcacttccaccacggtgataa
(amino acids)
(SEQ ID NO: 316)
MALPVTALLLPLALLLHAARPEVQLVESGGGLVKPGGSLRLSCAASGFTFSRYGMSWVRQAPGKRLE
WVSTISGGGTYIYYPDSVKGRFTISRDNAKNTLYLQMNSLRAEDTAVYYCTRDNYGRNYDYGMDYWG
QGTLVTVSSGGGGSGGGGSGGGGSEIVLTQSPATLSLSPGERATLTCSATSSVSYIHWYQQRPGQSP
RLLIYSTSNLASGIPARFSGSGSGSDYTLTISSLEPEDFAVYYCQQRSSSPFTFGSGTKVEIKAPEL
LGGPSVFLFPPKPKDTLMISRTPEVTCVVVDVSHEDPEVKFNWYVDGVEVHNAKTKPREEQYNSTYR
VVSVLTVLHQDWLNGKEYKCKVSNKALPAPIEKTISKAKGQPREPQVYTLPPSREEMTKNQVSLTCL
VKGFYPSDIAVEWESNGQPENNYKTTPPVLDSDGSFFLYSKLTVDKSRWQQGNVFSCSVMHEALHNH
YTQKSLSLSPGKIYIWAPLAGTCGVLLLSLVITLYCKRGRKKLLYIFKQPFMRPVQTTQEEDGCSCR
FPEEEEGGCELRVKFSRSADAPAYKQGQNQLYNELNLGRREEYDVLDKRRGRDPEMGGKPRRKNPQE
GLYNELQKDKMAEAYSEIGMKGERRRGKGHDGLYQGLSTATKDTYDALHMQALPPR**
E6 CAR FcH pCDH gBLOCK sequence:
(DNA)
(SEQ ID NO: 317)
agtacctctaatctggcctcaggtatccctgcacgattttctggatctggttcaggttctgattaca
ccctcactatctctagcctggagcctgaagactttgccgtttattactgccagcagaggtctagctc
cccattcacctttgggagtgggaccaaggttgaaattaaagcacctgaactcctggggggaccgtca
gtcttcctcttccccccaaaacccaaggacaccctcatgatctcccggacccctgaggtcacatgcg
tggtggtggacgtgagccacgaagaccctgaggtcaagttcaactggtacgtggacggcgtggaggt
gcataatgccaagacaaagccgcgggaggagcagtacaacagcacgtaccgtgtggtcagcgtcctc
accgtcctgcaccaggactggctgaatggcaaggagtacaagtgcaaggtctccaacaaagccctcc
cagcccccatcgagaaaaccatctccaaagccaaagggcagccccgagaaccacaggtgtacaccct
gcccccatcccgggaggagatgaccaagaaccaggtcagcctgacctgcctggtcaaaggcttctat
cccagcgacatcgccgtggagtgggagagcaatgggcagccggagaacaactacaagaccacgcctc
ccgtgctg
CAR E6 Fc/4/4-1BB/CD3z sequence:
(DNA)
(SEQ ID NO: 318)
atggccctgcccgtgaccgctttgctgctccccctggcgctgctgctgcacgccgccaggccagagg
tccagctggttgagagtggcggtgggctggttaagcctggcggctccctgcggctgagctgcgccgc
gagtggatttactttcagccgatatgggatgagttgggtgcggcaagctcccgggaagaggctggaa
tgggtctcaacaatctccggggggggcacttacatctattaccccgactcagtcaaggggagattta
ccatttcacgagacaacgctaagaataccctgtatttgcagatgaattctctgagagcagaggacac
agctgtttactattgtacccgcgacaactatggcaggaactacgactacggtatggactattgggga
caagggacattggttacagtgagcagtggcggcgggggcagcggaggaggaggcagcggtggcggag
gcagcgagatagtgctcacgcagtcacccgcgactctcagtctctcacctggggaacgagctaccct
gacgtgctctgctacctcctcagtgtcatatattcactggtatcagcaacggcccgggcagtcccct
agattgctcatttatagtacctctaatctggcctcaggtatccctgcacgattttctggatctggtt
caggttctgattacaccctcactatctctagcctggagcctgaagactttgccgtttattactgcca
gcagaggtctagctccccattcacctttgggagtgggaccaaggttgaaattaaagagcccaaatct
tgtgacaaaactcacacatgcccaccgtgcccagcacctgaactcctggggggaccgtcagtcttcc
tcttccccccaaaacccaaggacaccctcatgatctcccggacccctgaggtcacatgcgtggtggt
ggacgtgagccacgaagaccctgaggtcaagttcaactggtacgtggacggcgtggaggtgcataat
gccaagacaaagccgcgggaggagcagtacaacagcacgtaccgtgtggtcagcgtcctcaccgtcc
tgcaccaggactggctgaatggcaaggagtacaagtgcaaggtctccaacaaagccctcccagcccc
catcgagaaaaccatctccaaagccaaagggcagccccgagaaccacaggtgtacaccctgccccca
tcccgggaggagatgaccaagaaccaggtcagcctgacctgcctggtcaaaggcttctatcccagcg
acatcgccgtggagtgggagagcaatgggcagccggagaacaactacaagaccacgcctcccgtgct
ggactccgacggctccttcttcctctacagcaagctcaccgtggacaagagcaggtggcagcagggg
aacgtcttctcatgctccgtgatgcatgaggctctgcacaaccactacacgcagaagagcctctccc
tgtctccgggtaaaatggccctgattgtgctggggggcgtcgccggcctcctgcttttcattgggct
aggcatcttcttcaaaaggggccgcaaaaaactcctttacatttttaagcagccttttatgaggcca
gtacagacgactcaagaggaagacgggtgctcatgccgctttcctgaggaggaggaaggagggtgcg
aactgcgcgttaagttctcccgatcagccgacgcgcctgcttacaagcagggccagaaccaactgta
caacgagctgaatctcggtagacgggaagagtacgacgtgttggacaaacggagaggccgcgaccca
gaaatgggcggcaagcctcgcaggaaaaacccccaggagggactgtacaatgagttgcagaaagata
agatggcagaagcttatagcgagatcggaatgaagggggaaaggagacgagggaaaggacacgacgg
cctttatcagggcctgtccacagcaacaaaagatacgtatgacgccctccatatgcaggcacttcca
ccacggtgataa
(amino acids)
(SEQ ID NO: 319)
MALPVTALLLPLALLLHAARPEVQLVESGGGLVKPGGSLRLSCAASGFTFSRYGMSWVRQAPGKRLE
WVSTISGGGTYIYYPDSVKGRFTISRDNAKNTLYLQMNSLRAEDTAVYYCTRDNYGRNYDYGMDYWG
QGTLVTVSSGGGGSGGGGSGGGGSEIVLTQSPATLSLSPGERATLTCSATSSVSYIHWYQQRPGQSP
RLLIYSTSNLASGIPARFSGSGSGSDYTLTISSLEPEDFAVYYCQQRSSSPFTFGSGTKVEIKEPKS
CDKTHTCPPCPAPELLGGPSVFLFPPKPKDTLMISRTPEVTCVVVDVSHEDPEVKFNWYVDGVEVHN
AKTKPREEQYNSTYRVVSVLTVLHQDWLNGKEYKCKVSNKALPAPIEKTISKAKGQPREPQVYTLPP
SREEMTKNQVSLTCLVKGFYPSDIAVEWESNGQPENNYKTTPPVLDSDGSFFLYSKLTVDKSRWQQG
NVFSCSVMHEALHNHYTQKSLSLSPGKMALIVLGGVAGLLLFIGLGIFFKRGRKKLLYIFKQPFMRP
VQTTQEEDGCSCRFPEEEEGGCELRVKFSRSADAPAYKQGQNQLYNELNLGRREEYDVLDKRRGRDP
EMGGKPRRKNPQEGLYNELQKDKMAEAYSEIGMKGERRRGKGHDGLYQGLSTATKDTYDALHMQALP
PR**
E6 CAR 44BB3 pCDH gBLOCK sequence:
(DNA)
(SEQ ID NO: 320)
agaacaactacaagaccacgcctcccgtgctggactccgacggctccttcttcctctacagcaagct
caccgtggacaagagcaggtggcagcaggggaacgtcttctcatgctccgtgatgcatgaggctctg
cacaaccactacacgcagaagagcctctccctgtctccgggtaaaatggccctgattgtgctggggg
gcgtcgccggcctcctgcttttcattgggctaggcatcttcttcaaaaggggccgcaaaaaactcct
ttacatttttaagcagccttttatgaggccagtacagacgactcaagaggaagacgggtgctcatgc
cgctttcctgaggaggaggaaggagggtgcgaactgcgcgttaagttctcccgatcagccgacgcgc
ctgcttacaagcagggccagaaccaactgtacaacgagctgaatctcggtagacgggaagagtacga
cgtgttggacaaacggagaggccgcgacccagaaatgggcggcaagcctcgcaggaaaaacccccag
gagggactgtacaatgagttgcagaaagataagatggcagaagcttatagcgagatcggaatgaagg
gggaaaggagacgagggaaaggacacgacggcctttatcagggcctgtccacagcaacaaaagatac
gtatgacgccctccatatgcaggcacttccaccacggtgataagtttaaacccgctgatcaggcggc
cgcgaaggatctgcgatcgctccggtgcccgtcag
CAR E6 FcH/4/4-1BB/CD3z sequence:
(DNA)
(SEQ ID NO: 321)
atggccctgcccgtgaccgctttgctgctccccctggcgctgctgctgcacgccgccaggccagagg
tccagctggttgagagtggcggtgggctggttaagcctggcggctccctgcggctgagctgcgccgc
gagtggatttactttcagccgatatgggatgagttgggtgcggcaagctcccgggaagaggctggaa
tgggtctcaacaatctccggggggggcacttacatctattaccccgactcagtcaaggggagattta
ccatttcacgagacaacgctaagaataccctgtatttgcagatgaattctctgagagcagaggacac
agctgtttactattgtacccgcgacaactatggcaggaactacgactacggtatggactattgggga
caagggacattggttacagtgagcagtggcggcgggggcagcggaggaggaggcagcggtggcggag
gcagcgagatagtgctcacgcagtcacccgcgactctcagtctctcacctggggaacgagctaccct
gacgtgctctgctacctcctcagtgtcatatattcactggtatcagcaacggcccgggcagtcccct
agattgctcatttatagtacctctaatctggcctcaggtatccctgcacgattttctggatctggtt
caggttctgattacaccctcactatctctagcctggagcctgaagactttgccgtttattactgcca
gcagaggtctagctccccattcacctttgggagtgggaccaaggttgaaattaaagcacctgaactc
ctggggggaccgtcagtcttcctcttccccccaaaacccaaggacaccctcatgatctcccggaccc
ctgaggtcacatgcgtggtggtggacgtgagccacgaagaccctgaggtcaagttcaactggtacgt
ggacggcgtggaggtgcataatgccaagacaaagccgcgggaggagcagtacaacagcacgtaccgt
gtggtcagcgtcctcaccgtcctgcaccaggactggctgaatggcaaggagtacaagtgcaaggtct
ccaacaaagccctcccagcccccatcgagaaaaccatctccaaagccaaagggcagccccgagaacc
acaggtgtacaccctgcccccatcccgggaggagatgaccaagaaccaggtcagcctgacctgcctg
gtcaaaggcttctatcccagcgacatcgccgtggagtgggagagcaatgggcagccggagaacaact
acaagaccacgcctcccgtgctggactccgacggctccttcttcctctacagcaagctcaccgtgga
caagagcaggtggcagcaggggaacgtcttctcatgctccgtgatgcatgaggctctgcacaaccac
tacacgcagaagagcctctccctgtctccgggtaaaatggccctgattgtgctggggggcgtcgccg
gcctcctgcttttcattgggctaggcatcttcttcaaaaggggccgcaaaaaactcctttacatttt
taagcagccttttatgaggccagtacagacgactcaagaggaagacgggtgctcatgccgctttcct
gaggaggaggaaggagggtgcgaactgcgcgttaagttctcccgatcagccgacgcgcctgcttaca
agcagggccagaaccaactgtacaacgagctgaatctcggtagacgggaagagtacgacgtgttgga
caaacggagaggccgcgacccagaaatgggcggcaagcctcgcaggaaaaacccccaggagggactg
tacaatgagttgcagaaagataagatggcagaagcttatagcgagatcggaatgaagggggaaagga
gacgagggaaaggacacgacggcctttatcagggcctgtccacagcaacaaaagatacgtatgacgc
cctccatatgcaggcacttccaccacggtgataa
(amino acids)
(SEQ ID NO: 322)
MALPVTALLLPLALLLHAARPEVQLVESGGGLVKPGGSLRLSCAASGFTFSRYGMSWVRQAPGKRLE
WVSTISGGGTYIYYPDSVKGRFTISRDNAKNTLYLQMNSLRAEDTAVYYCTRDNYGRNYDYGMDYWG
QGTLVTVSSGGGGSGGGGSGGGGSEIVLTQSPATLSLSPGERATLTCSATSSVSYIHWYQQRPGQSP
RLLIYSTSNLASGIPARFSGSGSGSDYTLTISSLEPEDFAVYYCQQRSSSPFTFGSGTKVEIKAPEL
LGGPSVFLFPPKPKDTLMISRTPEVTCVVVDVSHEDPEVKFNWYVDGVEVHNAKTKPREEQYNSTYR
VVSVLTVLHQDWLNGKEYKCKVSNKALPAPIEKTISKAKGQPREPQVYTLPPSREEMTKNQVSLTCL
VKGFYPSDIAVEWESNGQPENNYKTTPPVLDSDGSFFLYSKLTVDKSRWQQGNVFSCSVMHEALHNH
YTQKSLSLSPGKMALIVLGGVAGLLLFIGLGIFFKRGRKKLLYIFKQPFMRPVQTTQEEDGCSCRFP
EEEEGGCELRVKFSRSADAPAYKQGQNQLYNELNLGRREEYDVLDKRRGRDPEMGGKPRRKNPQEGL
YNELQKDKMAEAYSEIGMKGERRRGKGHDGLYQGLSTATKDTYDALHMQALPPR**
CAR E6 IgD/8/4-1BB/CD3z sequence:
(DNA)
(SEQ ID NO: 323)
atggccctgcccgtgaccgctttgctgctccccctggcgctgctgctgcacgccgccaggccagaggtccagc
tggttgagagtggcggtgggctggttaagcctggcggctccctgcggctgagctgcgccgcgagtggatttac
tttcagccgatatgggatgagttgggtgcggcaagctcccgggaagaggctggaatgggtctcaacaatctcc
ggggggggcacttacatctattaccccgactcagtcaaggggagatttaccatttcacgagacaacgctaaga
ataccctgtatttgcagatgaattctctgagagcagaggacacagctgtttactattgtacccgcgacaacta
tggcaggaactacgactacggtatggactattggggacaagggacattggttacagtgagcagtggcggcggg
ggcagcggaggaggaggcagcggtggcggaggcagcgagatagtgctcacgcagtcacccgcgactctcagtc
tctcacctggggaacgagctaccctgacgtgctctgctacctcctcagtgtcatatattcactggtatcagca
acggcccgggcagtcccctagattgctcatttatagtacctctaatctggcctcaggtatccctgcacgattt
tctggatctggttcaggttctgattacaccctcactatctctagcctggagcctgaagactttgccgtttatt
actgccagcagaggtctagctccccattcacctttgggagtgggaccaaggttgaaattaaagagtctccaaa
ggcacaggcctcctcagtgcccactgcacaaccccaagcagagggcagcctcgccaaggcaaccacagcccca
gccaccacccgtaacacaggaagaggcggcgaagagaagaaaaaggagaaggagaaagaggaacaagaagaga
gagagacaaagacaccaatctacatttgggccccgctcgcaggcacatgtggagtgctcctcctctccctggt
gattaccctgtactgcaaaaggggccgcaaaaaactcctttacatttttaagcagccttttatgaggccagta
cagacgactcaagaggaagacgggtgctcatgccgctttcctgaggaggaggaaggagggtgcgaactgcgcg
ttaagttctcccgatcagccgacgcgcctgcttacaagcagggccagaaccaactgtacaacgagctgaatct
cggtagacgggaagagtacgacgtgttggacaaacggagaggccgcgacccagaaatgggcggcaagcctcgc
aggaaaaacccccaggagggactgtacaatgagttgcagaaagataagatggcagaagcttatagcgagatcg
gaatgaagggggaaaggagacgagggaaaggacacgacggcctttatcagggcctgtccacagcaacaaaaga
tacgtatgacgccctccatatgcaggcacttccaccacggtgataa
(amino acids)
(SEQ ID NO: 324)
MALPVTALLLPLALLLHAARPEVQLVESGGGLVKPGGSLRLSCAASGFTFSRYGMSWVRQAPGKRLE
WVSTISGGGTYIYYPDSVKGRFTISRDNAKNTLYLQMNSLRAEDTAVYYCTRDNYGRNYDYGMDYWG
QGTLVTVSSGGGGSGGGGSGGGGSEIVLTQSPATLSLSPGERATLTCSATSSVSYIHWYQQRPGQSP
RLLIYSTSNLASGIPARFSGSGSGSDYTLTISSLEPEDFAVYYCQQRSSSPFTFGSGTKVEIKESPK
AQASSVPTAQPQAEGSLAKATTAPATTRNTGRGGEEKKKEKEKEEQEERETKTPIYIWAPLAGTCGV
LLLSLVITLYCKRGRKKLLYIFKQPFMRPVQTTQEEDGCSCRFPEEEEGGCELRVKFSRSADAPAYK
QGQNQLYNELNLGRREEYDVLDKRRGRDPEMGGKPRRKNPQEGLYNELQKDKMAEAYSEIGMKGERR
RGKGHDGLYQGLSTATKDTYDALHMQALPPR**
E6 CAR IgD8 pcDH gBLOCK sequence:
(DNA)
(SEQ ID NO: 325)
agtacctctaatctggcctcaggtatccctgcacgattttctggatctggttcaggttctgattaca
ccctcactatctctagcctggagcctgaagactttgccgtttattactgccagcagaggtctagctc
cccattcacctttgggagtgggaccaaggttgaaattaaagagtctccaaaggcacaggcctcctca
gtgcccactgcacaaccccaagcagagggcagcctcgccaaggcaaccacagccccagccaccaccc
gtaacacaggaagaggcggcgaagagaagaaaaaggagaaggagaaagaggaacaagaagagagaga
gacaaagacaccaatctacatttgggccccgctcgcaggcacatgtggagtgctcctcctctccctg
gtgattaccctgtactgcaaaaggggccgcaaaaaactcctttacatttttaagcagccttttatga
ggccag
E6 CAR BB 3 pCDH gBLOCK sequence:
(DNA)
(SEQ ID NO: 326)
acatttttaagcagccttttatgaggccagtacagacgactcaagaggaagacgggtgctcatgccg
ctttcctgaggaggaggaaggagggtgcgaactgcgcgttaagttctcccgatcagccgacgcgcct
gcttacaagcagggccagaaccaactgtacaacgagctgaatctcggtagacgggaagagtacgacg
tgttggacaaacggagaggccgcgacccagaaatgggcggcaagcctcgcaggaaaaacccccagga
gggactgtacaatgagttgcagaaagataagatggcagaagcttatagcgagatcggaatgaagggg
gaaaggagacgagggaaaggacacgacggcctttatcagggcctgtccacagcaacaaaagatacgt
atgacgccctccatatgcaggcacttccaccacggtgataagtttaaacccgctgatcaggcggccg
cgaaggatctgcgatcgctccggtgcccgtcag
CAR E6 IgD/4/4-1BB/CD3z sequence:
(DNA)
(SEQ ID NO: 327)
atggccctgcccgtgaccgctttgctgctccccctggcgctgctgctgcacgccgccaggccagagg
tccagctggttgagagtggcggtgggctggttaagcctggcggctccctgcggctgagctgcgccgc
gagtggatttactttcagccgatatgggatgagttgggtgcggcaagctcccgggaagaggctggaa
tgggtctcaacaatctccggggggggcacttacatctattaccccgactcagtcaaggggagattta
ccatttcacgagacaacgctaagaataccctgtatttgcagatgaattctctgagagcagaggacac
agctgtttactattgtacccgcgacaactatggcaggaactacgactacggtatggactattgggga
caagggacattggttacagtgagcagtggcggcgggggcagcggaggaggaggcagcggtggcggag
gcagcgagatagtgctcacgcagtcacccgcgactctcagtctctcacctggggaacgagctaccct
gacgtgctctgctacctcctcagtgtcatatattcactggtatcagcaacggcccgggcagtcccct
agattgctcatttatagtacctctaatctggcctcaggtatccctgcacgattttctggatctggtt
caggttctgattacaccctcactatctctagcctggagcctgaagactttgccgtttattactgcca
gcagaggtctagctccccattcacctttgggagtgggaccaaggttgaaattaaagagtctccaaag
gcacaggcctcctcagtgcccactgcacaaccccaagcagagggcagcctcgccaaggcaaccacag
ccccagccaccacccgtaacacaggaagaggcggcgaagagaagaaaaaggagaaggagaaagagga
acaagaagagagagagacaaagacaccaatggccctgattgtgctggggggcgtcgccggcctcctg
cttttcattgggctaggcatcttcttcaaaaggggccgcaaaaaactcctttacatttttaagcagc
cttttatgaggccagtacagacgactcaagaggaagacgggtgctcatgccgctttcctgaggagga
ggaaggagggtgcgaactgcgcgttaagttctcccgatcagccgacgcgcctgcttacaagcagggc
cagaaccaactgtacaacgagctgaatctcggtagacgggaagagtacgacgtgttggacaaacgga
gaggccgcgacccagaaatgggcggcaagcctcgcaggaaaaacccccaggagggactgtacaatga
gttgcagaaagataagatggcagaagcttatagcgagatcggaatgaagggggaaaggagacgaggg
aaaggacacgacggcctttatcagggcctgtccacagcaacaaaagatacgtatgacgccctccata
tgcaggcacttccaccacggtgataa
(amino acids)
(SEQ ID NO: 328)
MALPVTALLLPLALLLHAARPEVQLVESGGGLVKPGGSLRLSCAASGFTFSRYGMSWVRQAPGKRLE
WVSTISGGGTYIYYPDSVKGRFTISRDNAKNTLYLQMNSLRAEDTAVYYCTRDNYGRNYDYGMDYWG
QGTLVTVSSGGGGSGGGGSGGGGSEIVLTQSPATLSLSPGERATLTCSATSSVSYIHWYQQRPGQSP
RLLIYSTSNLASGIPARFSGSGSGSDYTLTISSLEPEDFAVYYCQQRSSSPFTFGSGTKVEIKESPK
AQASSVPTAQPQAEGSLAKATTAPATTRNTGRGGEEKKKEKEKEEQEERETKTPMALIVLGGVAGLL
LFIGLGIFFKRGRKKLLYIFKQPFMRPVQTTQEEDGCSCRFPEEEEGGCELRVKFSRSADAPAYKQG
QNQLYNELNLGRREEYDVLDKRRGRDPEMGGKPRRKNPQEGLYNELQKDKMAEAYSEIGMKGERRRG
KGHDGLYQGLSTATKDTYDALHMQALPPR**
E6 CAR IgD4 pcDH gBLOCK sequence:
(DNA)
(SEQ ID NO: 329)
agtacctctaatctggcctcaggtatccctgcacgattttctggatctggttcaggttctgattaca
ccctcactatctctagcctggagcctgaagactttgccgtttattactgccagcagaggtctagctc
cccattcacctttgggagtgggaccaaggttgaaattaaagagtctccaaaggcacaggcctcctca
gtgcccactgcacaaccccaagcagagggcagcctcgccaaggcaaccacagccccagccaccaccc
gtaacacaggaagaggcggcgaagagaagaaaaaggagaaggagaaagaggaacaagaagagagaga
gacaaagacaccaatggccctgattgtgctggggggcgtcgccggcctcctgcttttcattgggcta
ggcatcttcttcaaaaggggccgcaaaaaactcctttacatttttaagcagccttttatgaggccag
CAR E6 X4/8/4-1BB/CD3z sequence:
(DNA)
(SEQ ID NO: 330)
atggccctgcccgtgaccgctttgctgctccccctggcgctgctgctgcacgccgccaggccagagg
tccagctggttgagagtggcggtgggctggttaagcctggcggctccctgcggctgagctgcgccgc
gagtggatttactttcagccgatatgggatgagttgggtgcggcaagctcccgggaagaggctggaa
tgggtctcaacaatctccggggggggcacttacatctattaccccgactcagtcaaggggagattta
ccatttcacgagacaacgctaagaataccctgtatttgcagatgaattctctgagagcagaggacac
agctgtttactattgtacccgcgacaactatggcaggaactacgactacggtatggactattgggga
caagggacattggttacagtgagcagtggcggcgggggcagcggaggaggaggcagcggtggcggag
gcagcgagatagtgctcacgcagtcacccgcgactctcagtctctcacctggggaacgagctaccct
gacgtgctctgctacctcctcagtgtcatatattcactggtatcagcaacggcccgggcagtcccct
agattgctcatttatagtacctctaatctggcctcaggtatccctgcacgattttctggatctggtt
caggttctgattacaccctcactatctctagcctggagcctgaagactttgccgtttattactgcca
gcagaggtctagctccccattcacctttgggagtgggaccaaggttgaaattaaagacaagacgcac
accaagccacctaaaccagctccagaactgctcggaggtcctggcaccggaaccggaggacctacca
tcaaaccacctaagccacctaagcctgctcctaacctgctcggaggacctatctacatttgggcccc
gctcgcaggcacatgtggagtgctcctcctctccctggtgattaccctgtactgcaaaaggggccgc
aaaaaactcctttacatttttaagcagccttttatgaggccagtacagacgactcaagaggaagacg
ggtgctcatgccgctttcctgaggaggaggaaggagggtgcgaactgcgcgttaagttctcccgatc
agccgacgcgcctgcttacaagcagggccagaaccaactgtacaacgagctgaatctcggtagacgg
gaagagtacgacgtgttggacaaacggagaggccgcgacccagaaatgggcggcaagcctcgcagga
aaaacccccaggagggactgtacaatgagttgcagaaagataagatggcagaagcttatagcgagat
cggaatgaagggggaaaggagacgagggaaaggacacgacggcctttatcagggcctgtccacagca
acaaaagatacgtatgacgccctccatatgcaggcacttccaccacggtgataa
(amino acids)
(SEQ ID NO: 331)
MALPVTALLLPLALLLHAARPEVQLVESGGGLVKPGGSLRLSCAASGFTFSRYGMSWVRQAPGKRLE
WVSTISGGGTYIYYPDSVKGRFTISRDNAKNTLYLQMNSLRAEDTAVYYCTRDNYGRNYDYGMDYWG
QGTLVTVSSGGGGSGGGGSGGGGSEIVLTQSPATLSLSPGERATLTCSATSSVSYIHWYQQRPGQSP
RLLIYSTSNLASGIPARFSGSGSGSDYTLTISSLEPEDFAVYYCQQRSSSPFTFGSGTKVEIKDKTH
TKPPKPAPELLGGPGTGTGGPTIKPPKPPKPAPNLLGGPIYIWAPLAGTCGVLLLSLVITLYCKRGR
KKLLYIFKQPFMRPVQTTQEEDGCSCRFPEEEEGGCELRVKFSRSADAPAYKQGQNQLYNELNLGRR
EEYDVLDKRRGRDPEMGGKPRRKNPQEGLYNELQKDKMAEAYSEIGMKGERRRGKGHDGLYQGLSTA
TKDTYDALHMQALPPR**
E6 CAR X48 pCDH gBLOCK sequence:
(DNA)
(SEQ ID NO: 332)
agtacctctaatctggcctcaggtatccctgcacgattttctggatctggttcaggttctgattaca
ccctcactatctctagcctggagcctgaagactttgccgtttattactgccagcagaggtctagctc
cccattcacctttgggagtgggaccaaggttgaaattaaagacaagacgcacaccaagccacctaaa
ccagctccagaactgctcggaggtcctggcaccggaaccggaggacctaccatcaaaccacctaagc
cacctaagcctgctcctaacctgctcggaggacctatctacatttgggccccgctcgcaggcacatg
tggagtgctcctcctctccctggtgattaccctgtactgcaaaaggggccgcaaaaaactcctttac
atttttaagcagccttttatgaggccag
CAR E6 X4/4/4-1BB/CD3z sequence:
(DNA)
(SEQ ID NO: 333)
atggccctgcccgtgaccgctttgctgctccccctggcgctgctgctgcacgccgccaggccagagg
tccagctggttgagagtggcggtgggctggttaagcctggcggctccctgcggctgagctgcgccgc
gagtggatttactttcagccgatatgggatgagttgggtgcggcaagctcccgggaagaggctggaa
tgggtctcaacaatctccggggggggcacttacatctattaccccgactcagtcaaggggagattta
ccatttcacgagacaacgctaagaataccctgtatttgcagatgaattctctgagagcagaggacac
agctgtttactattgtacccgcgacaactatggcaggaactacgactacggtatggactattgggga
caagggacattggttacagtgagcagtggcggcgggggcagcggaggaggaggcagcggtggcggag
gcagcgagatagtgctcacgcagtcacccgcgactctcagtctctcacctggggaacgagctaccct
gacgtgctctgctacctcctcagtgtcatatattcactggtatcagcaacggcccgggcagtcccct
agattgctcatttatagtacctctaatctggcctcaggtatccctgcacgattttctggatctggtt
caggttctgattacaccctcactatctctagcctggagcctgaagactttgccgtttattactgcca
gcagaggtctagctccccattcacctttgggagtgggaccaaggttgaaattaaagacaagacgcac
accaagccacctaaaccagctccagaactgctcggaggtcctggcaccggaaccggaggacctacca
tcaaaccacctaagccacctaagcctgctcctaacctgctcggaggacctatggccctgattgtgct
ggggggcgtcgccggcctcctgcttttcattgggctaggcatcttcttcaaaaggggccgcaaaaaa
ctcctttacatttttaagcagccttttatgaggccagtacagacgactcaagaggaagacgggtgct
catgccgctttcctgaggaggaggaaggagggtgcgaactgcgcgttaagttctcccgatcagccga
cgcgcctgcttacaagcagggccagaaccaactgtacaacgagctgaatctcggtagacgggaagag
tacgacgtgttggacaaacggagaggccgcgacccagaaatgggcggcaagcctcgcaggaaaaacc
cccaggagggactgtacaatgagttgcagaaagataagatggcagaagcttatagcgagatcggaat
gaagggggaaaggagacgagggaaaggacacgacggcctttatcagggcctgtccacagcaacaaaa
gatacgtatgacgccctccatatgcaggcacttccaccacggtgataa
(amino acids)
(SEQ ID NO: 334)
MALPVTALLLPLALLLHAARPEVQLVESGGGLVKPGGSLRLSCAASGFTFSRYGMSWVRQAPGKRLE
WVSTISGGGTYIYYPDSVKGRFTISRDNAKNTLYLQMNSLRAEDTAVYYCTRDNYGRNYDYGMDYWG
QGTLVTVSSGGGGSGGGGSGGGGSEIVLTQSPATLSLSPGERATLTCSATSSVSYIHWYQQRPGQSP
RLLIYSTSNLASGIPARFSGSGSGSDYTLTISSLEPEDFAVYYCQQRSSSPFTFGSGTKVEIKDKTH
TKPPKPAPELLGGPGTGTGGPTIKPPKPPKPAPNLLGGPMALIVLGGVAGLLLFIGLGIFFKRGRKK
LLYIFKQPFMRPVQTTQEEDGCSCRFPEEEEGGCELRVKFSRSADAPAYKQGQNQLYNELNLGRREE
YDVLDKRRGRDPEMGGKPRRKNPQEGLYNELQKDKMAEAYSEIGMKGERRRGKGHDGLYQGLSTATK
DTYDALHMQALPPR**
E6 CAR X44 pCDH gBLOCK sequence:
(DNA)
(SEQ ID NO: 335)
agtacctctaatctggcctcaggtatccctgcacgattttctggatctggttcaggttctgattaca
ccctcactatctctagcctggagcctgaagactttgccgtttattactgccagcagaggtctagctc
cccattcacctttgggagtgggaccaaggttgaaattaaagacaagacgcacaccaagccacctaaa
ccagctccagaactgctcggaggtcctggcaccggaaccggaggacctaccatcaaaccacctaagc
cacctaagcctgctcctaacctgctcggaggacctatggccctgattgtgctggggggcgtcgccgg
cctcctgcttttcattgggctaggcatcttcttcaaaaggggccgcaaaaaactcctttacattttt
aagcagccttttatgaggccag
CAR E6 8 + 4/4/4-1BB/CD3z sequence:
(DNA)
(SEQ ID NO: 336)
atggccctgcccgtgaccgctttgctgctccccctggcgctgctgctgcacgccgccaggccagagg
tccagctggttgagagtggcggtgggctggttaagcctggcggctccctgcggctgagctgcgccgc
gagtggatttactttcagccgatatgggatgagttgggtgcggcaagctcccgggaagaggctggaa
tgggtctcaacaatctccggggggggcacttacatctattaccccgactcagtcaaggggagattta
ccatttcacgagacaacgctaagaataccctgtatttgcagatgaattctctgagagcagaggacac
agctgtttactattgtacccgcgacaactatggcaggaactacgactacggtatggactattgggga
caagggacattggttacagtgagcagtggcggcgggggcagcggaggaggaggcagcggtggcggag
gcagcgagatagtgctcacgcagtcacccgcgactctcagtctctcacctggggaacgagctaccct
gacgtgctctgctacctcctcagtgtcatatattcactggtatcagcaacggcccgggcagtcccct
agattgctcatttatagtacctctaatctggcctcaggtatccctgcacgattttctggatctggtt
caggttctgattacaccctcactatctctagcctggagcctgaagactttgccgtttattactgcca
gcagaggtctagctccccattcacctttgggagtgggaccaaggttgaaattaaaacgacaaccccg
gcccccagaccaccaacgccagcccccaccatcgccagccaacccctgtctctgagaccagaagcct
gtaggcctgccgccggtggagctgtgcacacaagaggactggatttcgcctgtgatatggccctgat
tgtgctggggggcgtcgccggcctcctgcttttcattgggctaggcatcttcttcaaaaggggccgc
aaaaaactcctttacatttttaagcagccttttatgaggccagtacagacgactcaagaggaagacg
ggtgctcatgccgctttcctgaggaggaggaaggagggtgcgaactgcgcgttaagttctcccgatc
agccgacgcgcctgcttacaagcagggccagaaccaactgtacaacgagctgaatctcggtagacgg
gaagagtacgacgtgttggacaaacggagaggccgcgacccagaaatgggcggcaagcctcgcagga
aaaacccccaggagggactgtacaatgagttgcagaaagataagatggcagaagcttatagcgagat
cggaatgaagggggaaaggagacgagggaaaggacacgacggcctttatcagggcctgtccacagca
acaaaagatacgtatgacgccctccatatgcaggcacttccaccacggtgataa
(amino acids)
(SEQ ID NO: 337)
MALPVTALLLPLALLLHAARPEVQLVESGGGLVKPGGSLRLSCAASGFTFSRYGMSWVRQAPGKRLE
WVSTISGGGTYIYYPDSVKGRFTISRDNAKNTLYLQMNSLRAEDTAVYYCTRDNYGRNYDYGMDYWG
QGTLVTVSSGGGGSGGGGSGGGGSEIVLTQSPATLSLSPGERATLTCSATSSVSYIHWYQQRPGQSP
RLLIYSTSNLASGIPARFSGSGSGSDYTLTISSLEPEDFAVYYCQQRSSSPFTFGSGTKVEIKTTTP
APRPPTPAPTIASQPLSLRPEACRPAAGGAVHTRGLDFACDMALIVLGGVAGLLLFIGLGIFFKRGR
KKLLYIFKQPFMRPVQTTQEEDGCSCRFPEEEEGGCELRVKFSRSADAPAYKQGQNQLYNELNLGRR
EEYDVLDKRRGRDPEMGGKPRRKNPQEGLYNELQKDKMAEAYSEIGMKGERRRGKGHDGLYQGLSTA
TKDTYDALHMQALPPR**
E6 CAR CD844 pCDH gBLOCK sequence:
(DNA)
(SEQ ID NO: 338)
agtacctctaatctggcctcaggtatccctgcacgattttctggatctggttcaggttctgattaca
ccctcactatctctagcctggagcctgaagactttgccgtttattactgccagcagaggtctagctc
cccattcacctttgggagtgggaccaaggttgaaattaaaacgacaaccccggcccccagaccacca
acgccagcccccaccatcgccagccaacccctgtctctgagaccagaagcctgtaggcctgccgccg
gtggagctgtgcacacaagaggactggatttcgcctgtgatatggccctgattgtgctggggggcgt
cgccggcctcctgcttttcattgggctaggcatcttcttcaaaaggggccgcaaaaaactcctttac
atttttaagcagccttttatgaggccag
Humanized C2 scFV sequence in CAR:
(DNA)
(SEQ ID NO: 339)
gagggccaccatggccttgccagtgacggccctgctgctgccattggctcttctgttgcacgctgccaggcct
gaagtgcagctcgtagagagtggcgggggactggtgaagcccggtggaagcctcagactcagttgcgccgcct
caggtttcactttttcaggttacgccatgtcctgggtaagacaggcaccggggaaaggactcgagtgggtgtc
tactatcagctcaggaggcacttatatatattatcctgactctgtaaaaggccgatttacgatttctcgcgac
aatgcaaagaactccctctacctccaaatgaacagtcttagggcagaagacactgctgtatactattgtgcac
gcctcggcggcgacaactactacgagtactttgacgtgtgggggaaagggactaccgtgacagtttcaagcgg
aggaggtggctcaggtggaggcgggtcaggggggggaggaagtgatattgtgctcacacaatccccagcctcc
ctggctgtgtctcccggccaacgcgctacaattacatgtcgggcctccaaaagcgtgagcaccagcggctaca
gctacatgcactggtatcaacagaaaccaggacaaccccccaaactgttgatttatctcgcttcaaacttgga
gtccggcgtgcctgcgcgcttttcagggagtgggagcggcacagattttacgctgactatcaaccccgtagaa
gcaaacgatacagcgaattattattgtcaacattcccgggaactcccctttacgttcggcgggggcacaaagg
tcgaaattaagagaacc
(amino acids)
(SEQ ID NO: 340)
EVQLVESGGGLVKPGGSLRLSCAASGFTFSGYAMSWVRQAPGKGLEWVSTISSGGTYIYYPDSVKGR
FTISRDNAKNSLYLQMNSLRAEDTAVYYCARLGGDNYYEYFDVWGKGTTVTVSSGGGGSGGGGSGGG
GSDIVLTQSPASLAVSPGQRATITCRASKSVSTSGYSYMHWYQQKPGQPPKLLIYLASNLESGVPAR
FSGSGSGTDFTLTINPVEANDTANYYCQHSRELPFTFGGGTKVEIKRT
Humanized E6 scFV sequence in CAR:
(DNA)
(SEQ ID NO: 341)
gaggtccagctggttgagagtggcggtgggctggttaagcctggcggctccctgcggctgagctgcg
ccgcgagtggatttactttcagccgatatgggatgagttgggtgcggcaagctcccgggaagaggct
ggaatgggtctcaacaatctccggggggggcacttacatctattaccccgactcagtcaaggggaga
tttaccatttcacgagacaacgctaagaataccctgtatttgcagatgaattctctgagagcagagg
acacagctgtttactattgtacccgcgacaactatggcaggaactacgactacggtatggactattg
gggacaagggacattggttacagtgagcagtggcggcgggggcagcggaggaggaggcagcggtggg
gggggcagcgagatagtgctcacgcagtcacccgcgactctcagtctctcacctggggaacgagcta
ccctgacgtgctctgctacctcctcagtgtcatatattcactggtatcagcaacggcccgggcagtc
ccctagattgctcatttatagtacctctaatctggcctcaggtatccctgcacgattttctggatct
ggttcaggttctgattacaccctcactatctctagcctggagcctgaagactttgccgtttattact
gccagcagaggtctagctccccattcacctttgggagtgggaccaaggttgaaattaaa
(amino acids)
(SEQ ID NO: 342)
EVQLVESGGGLVKPGGSLRLSCAASGFTFSRYGMSWVRQAPGKRLEWVSTISGGGTYIYYPDSVKGR
FTISRDNAKNTLYLQMNSLRAEDTAVYYCTRDNYGRNYDYGMDYWGQGTLVTVSSGGGGSGGGGSGG
GGSEIVLTQSPATLSLSPGERATLTCSATSSVSYIHWYQQRPGQSPRLLIYSTSNLASGIPARFSGS
GSGSDYTLTISSLEPEDFAVYYCQQRSSSPFTFGSGTKVEIK
CD8 leader sequence:
(DNA)
(SEQ ID NO: 343)
atggccctgcccgtgaccgctttgctgctccccctggcgctgctgctgcacgccgccaggcca
(amino acids)
(SEQ ID NO: 344)
MALPVTALLLPLALLLHAARP
CD8 hinge domain sequence:
(DNA)
(SEQ ID NO: 345)
acgacaaccccggcccccagaccaccaacgccagcccccaccatcgccagccaacccctgtctctga
gaccagaagcctgtaggcctgccgccggtggagctgtgcacacaagaggactggatttcgcctgtga
t
(amino acids)
(SEQ ID NO: 346)
TTTPAPRPPTPAPTIASQPLSLRPEACRPAAGGAVHTRGLDFACD
CD4 hinge domain sequence:
(DNA)
(SEQ ID NO: 347)
tcgggacaggtcctgctggaatccaacatcaaggttctgcccacatggtccaccccggtgcagcca
(amino acids)
(SEQ ID NO: 348)
SGQVLLESNIKVLPTWSTPVQP
CD28 hinge domain sequence:
(DNA)
(SEQ ID NO: 349)
aaacacctttgtccaagtcccctatttcccggaccttctaagccc
(amino acids)
(SEQ ID NO: 350)
KHLCPSPLFPGPSKP
CD8 + CD4 hinge domain sequence:
(DNA)
(SEQ ID NO: 351)
acgacaaccccggcccccagaccaccaacgccagcccccaccatcgccagccaacccctgtctctga
gaccagaagcctgtaggcctgccgccggtggagctgtgcacacaagaggactggatttcgcctgtga
ttcgggacaggtcctgctggaatccaacatcaaggttctgcccacatggtccaccccggtgcagcca
(amino acids)
(SEQ ID NO: 352)
TTTPAPRPPTPAPTIASQPLSLRPEACRPAAGGAVHTRGLDFACDSGQVLLESNIKVLPTWSTPVQP
CD8 + CD28 hinge domain sequence:
(DNA)
(SEQ ID NO: 353)
acgacaaccccggcccccagaccaccaacgccagcccccaccatcgccagccaacccctgtctctga
gaccagaagcctgtaggcctgccgccggtggagctgtgcacacaagaggactggatttcgcctgtga
taaacacctttgtccaagtcccctatttcccggaccttctaagccc
(amino acids)
(SEQ ID NO: 354)
TTTPAPRPPTPAPTIASQPLSLRPEACRPAAGGAVHTRGLDFACDKHLCPSPLFPGPSKP
CD28 + CD4 hinge domain sequence:
(DNA)
(SEQ ID NO: 355)
aaacacctttgtccaagtcccctatttcccggaccttctaagccctcgggacaggtcctgctggaat
ccaacatcaaggttctgcccacatggtccaccccggtgcagcca
(amino acids)
(SEQ ID NO: 356)
KHLCPSPLFPGPSKPSGQVLLESNIKVLPTWSTPVQP
Human IgD hinge domain sequence:
(DNA)
(SEQ ID NO: 357)
gagtctccaaaggcacaggcctcctcagtgcccactgcacaaccccaagcagagggcagcctcgcca
aggcaaccacagccccagccaccacccgtaacacaggaagaggcggcgaagagaagaaaaaggagaa
ggagaaagaggaacaagaagagagagagacaaagacacca
(amino acids)
(SEQ ID NO: 358)
ESPKAQASSVPTAQPQAEGSLAKATTAPATTRNTGRGGEEKKKEKEKEEQEERETKTP
X4 linker (IgG1 and IgG2 modified hinge region) sequence:
(DNA)
(SEQ ID NO: 359)
gacaagacgcacaccaagccacctaaaccagctccagaactgctcggaggtcctggcaccggaaccg
gaggacctaccatcaaaccacctaagccacctaagcctgctcctaacctgctcggaggacct
(amino acids)
(SEQ ID NO: 360)
DKTHTKPPKPAPELLGGPGTGTGGPTIKPPKPPKPAPNLLGGP
CD3 zeta transmembrane domain sequence:
(DNA)
(SEQ ID NO: 361)
ctctgctacctgctggatggaatcctcttcatctatggtgtcattctcactgccttgttcctg
(amino acids)
(SEQ ID NO: 362)
LCYLLDGILFIYGVILTALFL
CD8 transmembrane domain sequence:
(DNA)
(SEQ ID NO: 363)
atctacatttgggccccgctcgcaggcacatgtggagtgctcctcctctccctggtgattaccctgt
actgc
(amino acids)
(SEQ ID NO: 364)
IYIWAPLAGTCGVLLLSLVITLYC
CD4 transmembrane domain sequence:
(DNA)
(SEQ ID NO: 365)
atggccctgattgtgctggggggcgtcgccggcctcctgcttttcattgggctaggcatcttcttc
(amino acids)
(SEQ ID NO: 366)
MALIVLGGVAGLLLFIGLGIFF
CD28 transmembrane domain sequence:
(DNA)
(SEQ ID NO: 367)
ttttgggtgctggtggtggttggtggagtcctggcttgctatagcttgctagtaacagtggccttta
ttattttctgggtg
(amino acids)
(SEQ ID NO: 368)
FWVLVVVGGVLACYSLLVTVAFIIFWV
4-1BB transmembrane domain sequence:
(DNA)
(SEQ ID NO: 369)
atcatctccttctttcttgcgctgacgtcgactgcgttgctcttcctgctgttcttcctcacgctcc
gtttctctgttgtt
(amino acids)
(SEQ ID NO: 370)
IISFFLALTSTALLFLLFFLTLRFSVV
OX40 transmembrane domain sequence:
(DNA)
(SEQ ID NO: 371)
gttgccgccatcctgggcctgggcctggtgctggggctgctgggccccctggccatcctgctggccc
tgtacctgctc
(amino acids)
(SEQ ID NO: 372)
VAAILGLGLVLGLLGPLAILLALYLL
CD3 zeta domain sequence:
(DNA)
(SEQ ID NO: 373)
cgcgttaagttctcccgatcagccgacgcgcctgcttacaagcagggccagaaccaactgtacaacg
agctgaatctcggtagacgggaagagtacgacgtgttggacaaacggagaggccgcgacccagaaat
gggcggcaagcctcgcaggaaaaacccccaggagggactgtacaatgagttgcagaaagataagatg
gcagaagcttatagcgagatcggaatgaagggggaaaggagacgagggaaaggacacgacggccttt
atcagggcctgtccacagcaacaaaagatacgtatgacgccctccatatgcaggcacttccaccacg
g
(amino acids)
(SEQ ID NO: 374)
RVKFSRSADAPAYKQGQNQLYNELNLGRREEYDVLDKRRGRDPEMGGKPRRKNPQEGLYNELQKDKM
AEAYSEIGMKGERRRGKGHDGLYQGLSTATKDTYDALHMQALPPR
CD3 zeta domain variant sequence:
(DNA)
(SEQ ID NO: 375)
agagtgaagttcagcaggagcgcagacgcccccgcgtaccagcagggccagaaccagctctataacg
agctcaatctaggacgaagagaggagtacgatgttttggacaagagacgtggccgggaccctgagat
ggggggaaagccgagaaggaagaaccctcaggaaggcctgtacaatgaactgcagaaagataagatg
gcggaggcctacagtgagattgggatgaaaggcgagcgccggaggggcaaggggcacgatggccttt
accagggtctcagtacagccaccaaggacacctacgacgcccttcacatgcaggccctgccccctcg
c
(amino acids)
(SEQ ID NO: 376)
RVKFSRSADAPAYQQGQNQLYNELNLGRREEYDVLDKRRGRDPEMGGKPRRKNPQEGLYNELQKDKM
AEAYSEIGMKGERRRGKGHDGLYQGLSTATKDTYDALHMQALPPR
CD28 domain sequence:
(DNA)
(SEQ ID NO: 377)
agaagcaagcggtctcggctcctgcattctgattacatgaacatgaccccaagaagaccaggcccca
ccaggaaacattaccagccctacgctccgccacgcgacttcgctgcctaccggtcc
(amino acids)
(SEQ ID NO: 378)
RSKRSRLLHSDYMNMTPRRPGPTRKHYQPYAPPRDFAAYRS
4-1BB domain sequence:
(DNA)
(SEQ ID NO: 379)
aaaaggggccgcaaaaaactcctttacatttttaagcagccttttatgaggccagtacagacgactc
aagaggaagacgggtgctcatgccgctttcctgaggaggaggaaggagggtgcgaactg
(amino acids)
(SEQ ID NO: 380)
KRGRKKLLYIFKQPFMRPVQTTQEEDGCSCRFPEEEEGGCEL
OX40 domain sequence:
(DNA)
(SEQ ID NO: 381)
cggagggaccagaggctgccccccgatgcccacaagccccctgggggaggcagtttccggaccccca
tccaagaggagcaggccgacgcccactccaccctggccaagatc
(amino acids)
(SEQ ID NO: 382)
RRDQRLPPDAHKPPGGGSFRTPIQEEQADAHSTLAKI
Humanized anti CD3 scFV clone 12F6 (VH-VL) sequence:
(DNA)
(SEQ ID NO: 383)
caggtgcagctggtgcagagcggaggtggagtggtccaacctggaagatctctgagactgagctgta
aggctagcgggtacacgttcacatcttacacgatgcactgggtgaggcaagcccccggtaagggcct
ggaatggatcggatatataaaccccagctcagggtataccaaatataatcagaagttcaaagatcgg
ttcacgatttctgctgataaaagtaagtccaccgctttcctgcagatggactcactcaggccagaag
atactggtgtttatttctgtgcaaggtggcaggactacgacgtgtactttgactattgggggcaggg
gacgcctgtaacagtatcaagcggcggtggcggatccggcggtggcggatccggcggtggcggatcc
gatattcagatgacccagagcccgagcagcctgagcgcgagcgtgggcgatcgcgtgaccatgacct
gccgcgcgagcagcagcgtgagctatatgcattggtatcagcagaccccgggcaaagcgccgaaacc
gtggatttatgcgaccagcaacctggcgagcggcgtgccgagccgctttagcggcagcggcagcggc
accgattataccctgaccattagcagcctgcagccggaagatattgcgacctattattgccagcagt
ggagcagcaacccgccgacctttggccagggcaccaaactgcagattacccgc
(amino acids)
(SEQ ID NO: 384)
QVQLVQSGGGVVQPGRSLRLSCKASGYTFTSYTMHWVRQAPGKGLEWIGYINPSSGYTKYNQKFKDR
FTISADKSKSTAFLQMDSLRPEDTGVYFCARWQDYDVYFDYWGQGTPVTVSSGGGGSGGGGSGGGGS
DIQMTQSPSSLSASVGDRVTMTCRASSSVSYMHWYQQTPGKAPKPWIYATSNLASGVPSRFSGSGSG
TDYTLTISSLQPEDIATYYCQQWSSNPPTFGQGTKLQITR
Humanized anti CD3 scFV clone 12F6 (VL-VH) sequence:
(DNA)
(SEQ ID NO: 385)
gatattcagatgacccagagcccgagcagcctgagcgcgagcgtgggcgatcgcgtgaccatgacct
gccgcgcgagcagcagcgtgagctatatgcattggtatcagcagaccccgggcaaagcgccgaaacc
gtggatttatgcgaccagcaacctggcgagcggcgtgccgagccgctttagcggcagcggcagcggc
accgattataccctgaccattagcagcctgcagccggaagatattgcgacctattattgccagcagt
ggagcagcaacccgccgacctttggccagggcaccaaactgcagattacccgcggcggtggcggatc
cggcggtggcggatccggcggtggcggatcccaggtgcagctggtgcagagcggaggtggagtggtc
caacctggaagatctctgagactgagctgtaaggctagcgggtacacgttcacatcttacacgatgc
actgggtgaggcaagcccccggtaagggcctggaatggatcggatatataaaccccagctcagggta
taccaaatataatcagaagttcaaagatcggttcacgatttctgctgataaaagtaagtccaccgct
ttcctgcagatggactcactcaggccagaagatactggtgtttatttctgtgcaaggtggcaggact
acgacgtgtactttgactattgggggcaggggacgcctgtaacagtatcaagc
(amino acids)
(SEQ ID NO: 386)
DIQMTQSPSSLSASVGDRVTMTCRASSSVSYMHWYQQTPGKAPKPWIYATSNLASGVPSRFSGSGSG
TDYTLTISSLQPEDIATYYCQQWSSNPPTFGQGTKLQITRGGGGSGGGGSGGGGSQVQLVQSGGGVV
QPGRSLRLSCKASGYTFTSYTMHWVRQAPGKGLEWIGYINPSSGYTKYNQKFKDRFTISADKSKSTA
FLQMDSLRPEDTGVYFCARWQDYDVYFDYWGQGTPVTVSS
Humanized anti CD3 scFV clone OKT3 (VH-VL) sequence:
(DNA)
(SEQ ID NO: 387)
caggtgcagctggtgcagagcggaggcggagtggtgcagcctggaagaagcctgcgcctgagctgca
aagcgagcggctatacctttacccgctataccatgcattgggtgcgccaggcgccgggcaaaggcct
ggaatggattggctatattaacccgagccgcggctataccaactataaccagaaagtgaaagatcgc
tttaccattagcaccgataaaagcaaaagcaccgcgtttctgcagatggatagcctgcgcccggaag
ataccgcggtgtattattgcgcgcgctattatgatgatcattattgcctggattattggggccaggg
caccaccctgaccgtgagcagcggcggtggcggatccggcggtggcggatccggcggtggcggatcc
gatattcagatgacccagagcccgagcagcctgagcgcgagcgtgggcgatcgcgtgaccattacct
gcagcgcgagcagcagcgtgagctatatgaactggtatcagcagaccccgggcaaagcgccgaaacg
ctggatttatgataccagcaaactggcgagcggcgtgccgagccgctttagcggcagcggcagcggc
accgattatacctttaccattagcagcctgcagccggaagatattgcgacctattattgccagcagt
ggagcagcaacccgtttacctttggccagggcaccaaactgcagattacccgc
(amino acids)
(SEQ ID NO: 388)
QVQLVQSGGGVVQPGRSLRLSCKASGYTFTRYTMHWVRQAPGKGLEWIGYINPSRGYTNYNQKVKDR
FTISTDKSKSTAFLQMDSLRPEDTAVYYCARYYDDHYCLDYWGQGTTLTVSSGGGGSGGGGSGGGGS
DIQMTQSPSSLSASVGDRVTITCSASSSVSYMNWYQQTPGKAPKRWIYDTSKLASGVPSRFSGSGSG
TDYTFTISSLQPEDIATYYCQQWSSNPFTFGQGTKLQITR
Humanized anti CD3 scFV clone OKT3 (VH-VM) sequence:
(DNA)
(SEQ ID NO: 389)
gatattcagatgacccagagcccgagcagcctgagcgcgagcgtgggcgatcgcgtgaccattacct
gcagcgcgagcagcagcgtgagctatatgaactggtatcagcagaccccgggcaaagcgccgaaacg
ctggatttatgataccagcaaactggcgagcggcgtgccgagccgctttagcggcagcggcagcggc
accgattatacctttaccattagcagcctgcagccggaagatattgcgacctattattgccagcagt
ggagcagcaacccgtttacctttggccagggcaccaaactgcagattacccgcggcggtggcggatc
cggcggtggcggatccggcggtggcggatcccaggtgcagctggtgcagagcggaggcggagtggtg
cagcctggaagaagcctgcgcctgagctgcaaagcgagcggctatacctttacccgctataccatgc
attgggtgcgccaggcgccgggcaaaggcctggaatggattggctatattaacccgagccgcggcta
taccaactataaccagaaagtgaaagatcgctttaccattagcaccgataaaagcaaaagcaccgcg
tttctgcagatggatagcctgcgcccggaagataccgcggtgtattattgcgcgcgctattatgatg
atcattattgcctggattattggggccagggcaccaccctgaccgtgagcagc
(amino acids)
(SEQ ID NO: 390)
DIQMTQSPSSLSASVGDRVTITCSASSSVSYMNWYQQTPGKAPKRWIYDTSKLASGVPSRFSGSGSG
TDYTFTISSLQPEDIATYYCQQWSSNPFTFGQGTKLQITRGGGGSGGGGSGGGGSQVQLVQSGGGVV
QPGRSLRLSCKASGYTFTRYTMHWVRQAPGKGLEWIGYINPSRGYTNYNQKVKDRFTISTDKSKSTA
FLQMDSLRPEDTAVYYCARYYDDHYCLDYWGQGTTLTVSS
HumanizeE6 scFV (VH-VL) sequence:
(DNA)
(SEQ ID NO: 391)
gaggtgcagctggtggagtctgggggaggcctggtcaagcctggggggtccctgagactctcctgtg
cagcctctggattcaccttcagtaggtatggcatgagctgggtccgccaggctccagggaagaggct
ggagtgggtctcaaccattagtggcggaggcacctacatatactacccagactcagtgaagggccga
ttcaccatctccagagacaacgccaagaacaccctgtatctgcaaatgaacagcctgagagccgagg
acacggctgtgtattactgtaccagagataactatggccgcaactatgattatggcatggattattg
gggccagggcaccctggtgaccgtgagcagcggcggtggcggatccggcggtggcggatccggcggt
ggcggatccgaaattgtgttgacacagtctccagccaccctgtctttgtctccaggggaaagagcca
ccctcacctgcagcgccaccagcagtgttagctacatccactggtaccaacagaggcctggccagag
ccccaggctcctcatctatagcacctccaacctggccagcggcatcccagccaggttcagtggcagt
gggtctgggagcgactacactctcaccatcagcagcctagagcctgaagattttgcagtttattact
gtcagcagcgtagcagctcccctttcacctttggcagcggcaccaaagtggaaattaaa
(amino acids)
(SEQ ID NO: 392)
EVQLVESGGGLVKPGGSLRLSCAASGFTFSRYGMSWVRQAPGKRLEWVSTISGGGTYIYYPDSVKGR
FTISRDNAKNTLYLQMNSLRAEDTAVYYCTRDNYGRNYDYGMDYWGQGTLVTVSSGGGGSGGGGSGG
GGSEIVLTQSPATLSLSPGERATLTCSATSSVSYIHWYQQRPGQSPRLLIYSTSNLASGIPARFSGS
GSGSDYTLTISSLEPEDFAVYYCQQRSSSPFTFGSGTKVEIK
HumanizeE6 scFV (VL-VH) sequence:
(DNA)
(SEQ ID NO: 393)
gaaattgtgttgacacagtctccagccaccctgtctttgtctccaggggaaagagccaccctcacct
gcagcgccaccagcagtgttagctacatccactggtaccaacagaggcctggccagagccccaggct
cctcatctatagcacctccaacctggccagcggcatcccagccaggttcagtggcagtgggtctggg
agcgactacactctcaccatcagcagcctagagcctgaagattttgcagtttattactgtcagcagc
gtagcagctcccctttcacctttggcagcggcaccaaagtggaaattaaaggcggtggcggatccgg
cggtggcggatccggcggtggcggatccgaggtgcagctggtggagtctgggggaggcctggtcaag
cctggggggtccctgagactctcctgtgcagcctctggattcaccttcagtaggtatggcatgagct
gggtccgccaggctccagggaagaggctggagtgggtctcaaccattagtggcggaggcacctacat
atactacccagactcagtgaagggccgattcaccatctccagagacaacgccaagaacaccctgtat
ctgcaaatgaacagcctgagagccgaggacacggctgtgtattactgtaccagagataactatggcc
gcaactatgattatggcatggattattggggccagggcaccctggtgaccgtgagcagc
(amino acids)
(SEQ ID NO: 394)
EIVLTQSPATLSLSPGERATLTCSATSSVSYIHWYQQRPGQSPRLLIYSTSNLASGIPARFSGSGSG
SDYTLTISSLEPEDFAVYYCQQRSSSPFTFGSGTKVEIKGGGGSGGGGSGGGGSEVQLVESGGGLVK
PGGSLRLSCAASGFTFSRYGMSWVRQAPGKRLEWVSTISGGGTYIYYPDSVKGRFTISRDNAKNTLY
LQMNSLRAEDTAVYYCTRDNYGRNYDYGMDYWGQGTLVTVSS
HumanizeC2 scFV (VH-VL) sequence:
(DNA)
(SEQ ID NO: 395)
gaggtgcagctggtggagtctgggggaggcctggtcaagcctggggggtccctgagactctcctgtg
cagcctctggattcaccttcagtggctatgccatgagctgggtccgccaggctccagggaaggggct
ggagtgggtctcaaccattagtagtggcggaacctacatatactaccccgactcagtgaagggccga
ttcaccatctccagagacaacgccaagaactcactgtatctgcaaatgaacagcctgagagccgagg
acacggccgtgtattactgtgcgagacttgggggggataattactacgaatacttcgatgtctgggg
caaagggaccacggtcaccgtctcctccggcggtggcggatccggcggtggcggatccggcggtggc
ggatccgacattgtgctgacccagtctccagcctccttggccgtgtctccaggacagagggccacca
tcacctgcagagccagtaagagtgtcagtaccagcggatactcctacatgcactggtatcagcagaa
accaggacaacctcctaaactcctgatttacctggcatccaatctggagagcggggtcccagccagg
ttcagcggcagtgggtctgggaccgatttcaccctcacaattaatcctgtggaagctaatgatactg
caaattattactgtcagcacagtagggagctgcctttcacattcggcggagggaccaaggtggagat
caaacgaact
(amino acids)
(SEQ ID NO: 396)
EVQLVESGGGLVKPGGSLRLSCAASGFTFSGYAMSWVRQAPGKGLEWVSTISSGGTYIYYPDSVKGR
FTISRDNAKNSLYLQMNSLRAEDTAVYYCARLGGDNYYEYFDVWGKGTTVTVSSGGGGSGGGGSGGG
GSDIVLTQSPASLAVSPGQRATITCRASKSVSTSGYSYMHWYQQKPGQPPKLLIYLASNLESGVPAR
FSGSGSGTDFTLTINPVEANDTANYYCQHSRELPFTFGGGTKVEIKRT
HumanizeE6 scFV (VL-VH) sequence:
(DNA)
(SEQ ID NO: 397)
gacattgtgctgacccagtctccagcctccttggccgtgtctccaggacagagggccaccatcacct
gcagagccagtaagagtgtcagtaccagcggatactcctacatgcactggtatcagcagaaaccagg
acaacctcctaaactcctgatttacctggcatccaatctggagagcggggtcccagccaggttcagc
ggcagtgggtctgggaccgatttcaccctcacaattaatcctgtggaagctaatgatactgcaaatt
attactgtcagcacagtagggagctgcctttcacattcggcggagggaccaaggtggagatcaaacg
aactggcggtggcggatccggcggtggcggatccggcggtggcggatccgaggtgcagctggtggag
tctgggggaggcctggtcaagcctggggggtccctgagactctcctgtgcagcctctggattcacct
tcagtggctatgccatgagctgggtccgccaggctccagggaaggggctggagtgggtctcaaccat
tagtagtggcggaacctacatatactaccccgactcagtgaagggccgattcaccatctccagagac
aacgccaagaactcactgtatctgcaaatgaacagcctgagagccgaggacacggccgtgtattact
gtgcgagacttgggggggataattactacgaatacttcgatgtctggggcaaagggaccacggtcac
cgtctcctcc
(amino acids)
(SEQ ID NO: 398)
DIVLTQSPASLAVSPGQRATITCRASKSVSTSGYSYMHWYQQKPGQPPKLLIYLASNLESGVPARFS
GSGSGTDFTLTINPVEANDTANYYCQHSRELPFTFGGGTKVEIKRTGGGGSGGGGSGGGGSEVQLVE
SGGGLVKPGGSLRLSCAASGFTFSGYAMSWVRQAPGKGLEWVSTISSGGTYIYYPDSVKGRFTISRD
NAKNSLYLQMNSLRAEDTAVYYCARLGGDNYYEYFDVWGKGTTVTVSS
G₄S₁ linker sequence:
(DNA)
(SEQ ID NO: 399)
ggcggtggcggatcc
(amino acids)
(SEQ ID NO:400)
GGGGS
[G₄S₁]x3 linker sequence:
(DNA)
(SEQ ID NO: 401)
ggcggtggcggatccggcggtggcggatccggcggtggcggatcc
(amino acids)
(SEQ ID NO: 402)
GGGGSGGGGSGGGGS
8 aa GS linker sequence:
(DNA)
(SEQ ID NO: 403)
ggcggttccggcggtggatccgga
(amino acids)
(SEQ ID NO: 404)
GGSGGGSG
12 aa GS linker sequence:
(DNA)
(SEQ ID NO: 405)
ggcggttccggcggtggatccggcggtggcggatccgga
(amino acids)
(SEQ ID NO: 406)
GGSGGGSGGGSG
13 aa GS linker sequence:
(DNA)
(SEQ ID NO: 407)
ggcggtggatccggcggtggcggatccggcggtggatcc
(amino acids)
(SEQ ID NO: 408)
GGGSGGGGSGGGS
22 aa GS linker sequence:
(DNA)
(SEQ ID NO: 409)
ggcggtggaagcggcggtggcggatccggcagcggcggaagcggcggtggcggatccggcggtgga
(amino acids)
(SEQ ID NO: 4110)
GGGSGGGGSGSGGSGGGGSGGG
24 aa GS linker sequence:
(DNA)
(SEQ ID NO: 411)
ggcggttccggcggtggatccggcggtggcggatccggaggcggttccggcggtggatccggcggtg
gcggatccgga
(amino acids)
(SEQ ID NO: 412)
GGSGGGSGGGSGGGSGGGSGGGSG
Mouse C3 Heavy chain variable region sequence:
(DNA)
(SEQ ID NO: 413)
caggtccagctgcagcagtctgggcctgagctggtgaggcctggggtctcagtgaagatttcctgcaagggtt
ccggctacagattcactgattatgctatgaactgggtgaagcagagtcatgcaaagagtctagagtggattgg
agttattagtactttctctggtaatacaaacttcaaccagaagtttaagggcaaggccacaatgactgtagac
aaatcctccagcacagcctatatggaacttgccagattgacatctgaggattctgccatgtattactgtgcaa
gatcggattactacggcccatactttgactactggggccaaggcaccactctcacagtctcctca
(amino acids)
(SEQ ID NO: 414)
QVQLQQSGPELVRPGVSVKISCKGSGYRFTDYAMNWVKQSHAKSLEWIGVISTFSGNTNFNQKFKGKATMTVD
KSSSTAYMELARLTSEDSAMYYCARSDYYGPYFDYWGQGTTLTVSS
Mouse C3 heavy chain variable framework region 1 (FWR1) sequence:
(DNA)
(SEQ ID NO: 415)
caggtccagctgcagcagtctgggcctgagctggtgaggcctggggtctcagtgaagatttcctgcaagggtt
ccggctacagattcact
(amino acids)
(SEQ ID NO: 416)
QVQLQQSGPELVRPGVSVKISCKGSGYRFT
Mouse C3 heavy chain variable complementarity determining regions 1
(CDR1) sequence:
(DNA)
(SEQ ID NO: 417)
gattatgctatgaac
(amino acids)
(SEQ ID NO: 418)
DYAMN
Mouse C3 heavy chain variable framework region 2 (FWR2) sequence:
(DNA)
(SEQ ID NO: 419)
tgggtgaagcagagtcatgcaaagagtctagagtggattgga
(amino acids)
(SEQ ID NO: 420)
WVKQSHAKSLEWIG
Mouse C3 heavy chain variable complementarity determining regions 2
(CDR2) sequence:
(DNA)
(SEQ ID NO: 421)
gttattagtactttctctggtaatacaaacttcaaccagaagtttaagggc
(amino acids)
(SEQ ID NO: 422)
VISTFSGNINFNQKFKG
Mouse C3 heavy chain variable framework region 3 (FWR3) acid sequence:
(DNA)
(SEQ ID NO: 423)
aaggccacaatgactgtagacaaatcctccagcacagcctatatggaacttgccagattgacatctgaggatt
ctgccatgtattactgtgcaaga
(amino acids)
(SEQ ID NO: 424)
KATMTVDKSSSTAYMELARLTSEDSAMYYCAR
Mouse C3 heavy chain variable complementarity determining regions 3
(CDR3) sequence:
(DNA)
(SEQ ID NO: 425)
tcggattactacggcccatactttgactac
(amino acids)
(SEQ ID NO: 426)
SDYYGPYFDY
IGHV1-18*04 heavy chain variable region sequence:
(DNA)
(SEQ ID NO: 427)
caggttcagctggtgcagtctggagctgaggtgaagaagcctggggcctcagtgaaggtctcctgca
aggcttctggttacacctttaccagctacggtatcagctgggtgcgacaggcccctggacaagggct
tgagtggatgggatggatcagcgcttacaatggtaacacaaactatgcacagaagctccagggcaga
gtcaccatgaccacagacacatccacgagcacagcctacatggagctgaggagcctgagatctgacg
acacggccgtgtattactgtgcgagaga
(amino acids)
(SEQ ID NO: 428)
QVQLVQSGAEVKKPGASVKVSCKASGYTFTSYGISWVRQAPGQGLEWMGWISAYNGNINYAQKLQGRVIMITD
TSTSTAYMELRSLRSDDTAVYYCAR
IGHV1-18*04 heavy chain variable framework region 1 (FWR1) sequence:
(DNA)
(SEQ ID NO: 429)
caggttcagctggtgcagtctggagctgaggtgaagaagcctggggcctcagtgaaggtctcctgcaaggctt
ctggttacacctttacc
(amino acids)
(SEQ ID NO: 430)
QVQLVQSGAEVKKPGASVKVSCKASGYTFT
IGHV1-18*04 heavy chain variable complementarity determining regions 1
(CDR1) sequence:
(DNA)
(SEQ ID NO: 431)
agctacggtatcagc
(amino acids)
(SEQ ID NO: 432)
SYGIS
IGHV1-18*04 heavy chain variable framework region 2 (FWR2) sequence:
(DNA)
(SEQ ID NO: 433)
tgggtgcgacaggcccctggacaagggcttgagtggatggga
(amino acids)
(SEQ ID NO: 434)
WVRQAPGQGLEWMG
IGHV1-18*04 heavy chain variable complementarity determining regions 2
(CDR2) sequence:
(DNA)
(SEQ ID NO: 435)
tggatcagcgcttacaatggtaacacaaactatgcacagaagctccagggc
(amino acids)
(SEQ ID NO: 436)
WISAYNGNTNYAQKLQG
IGHV1-18*04 heavy chain variable framework region 3 (FWR3) sequence:
(DNA)
(SEQ ID NO: 437)
agagtcaccatgaccacagacacatccacgagcacagcctacatggagctgaggagcctgagatctgacgaca
cggccgtgtattactgtgcgaga
(amino acids)
(SEQ ID NO: 438)
RVTMTTDTSTSTAYMELRSLRSDDTAVYYCAR
Humanized C3 heavy chain variable region sequence:
(DNA)
(SEQ ID NO: 439)
caggttcagctggtgcagtctggagctgaggtgaagaagcctggggcctcagtgaaggtctcctgcaaggctt
ctggttacacctttaccgactacgccatgaactgggtgcgacaggcccctggacaagggcttgagtggatggg
agtgatcagcaccttcagcggtaacacaaacttcaaccagaagttcaagggcagagtcaccatgaccacagac
acatccacgagcacagcctacatggagctgaggagcctgagatctgacgacacggccgtgtattactgtgcga
gaagcgactactacggcccatacttcgactactggggccagggcaccaccctgaccgtgtccagc
(amino acids)
(SEQ ID NO: 440)
QVQLVQSGAEVKKPGASVKVSCKASGYTFTDYAMNWVRQAPGQGLEWMGVISTFSGNTNFNQKFKGRVTMTTD
TSTSTAYMELRSLRSDDTAVYYCARSDYYGPYFDYWGQGTTLTVSS
Humanized C3 heavy chain variable framework region 1 (FWR1) acid
sequence:
(DNA)
(SEQ ID NO: 441)
caggttcagctggtgcagtctggagctgaggtgaagaagcctggggcctcagtgaaggtctcctgcaaggctt
ctggttacacctttacc
(amino acids)
(SEQ ID NO: 442)
QVQLVQSGAEVKKPGASVKVSCKASGYTFT
Humanized C3 heavy chain variable complementarity determining regions 1
(CDR1) sequence:
(DNA)
(SEQ ID NO: 443)
gactacgccatgaac
(amino acids)
(SEQ ID NO: 444)
DYAMN
Humanized C3 heavy chain variable framework region 2 (FWR2) acid
sequence:
(DNA)
(SEQ ID NO: 445)
tgggtgcgacaggcccctggacaagggcttgagtggatggga
(amino acids)
(SEQ ID NO: 446)
WVRQAPGQGLEWMG
Humanized C3 heavy chain variable complementarity determining regions 2
(CDR2) sequence:
(DNA)
(SEQ ID NO: 447)
gtgatcagcaccttcagcggtaacacaaacttcaaccagaagttcaagggc
(amino acids)
(SEQ ID NO: 448)
VISTFSGNTNFNQKFKG
Humanized C3 heavy chain variable framework region 3 (FWR3) acid
sequence:
(DNA)
(SEQ ID NO: 449)
agagtcaccatgaccacagacacatccacgagcacagcctacatggagctgaggagcctgagatctgacgaca
cggccgtgtattactgtgcgaga
(amino acids)
(SEQ ID NO: 450)
RVTMTTDTSTSTAYMELRSLRSDDTAVYYCAR
Humanized C3 heavy chain variable complementarity determining regions 3
(CDR3) sequence:
(DNA)
(SEQ ID NO: 451)
agcgactactacggcccatacttcgactac
(amino acids)
(SEQ ID NO: 452)
SDYYGPYFDY
Humanized C3 IgG1 heavy chain sequence
(DNA)
(SEQ ID NO: 453)
caggttcagctggtgcagtctggagctgaggtgaagaagcctggggcctcagtgaaggtctcctgcaaggctt
ctggttacacctttaccgactacgccatgaactgggtgcgacaggcccctggacaagggcttgagtggatggg
agtgatcagcaccttcagcggtaacacaaacttcaaccagaagttcaagggcagagtcaccatgaccacagac
acatccacgagcacagcctacatggagctgaggagcctgagatctgacgacacggccgtgtattactgtgcga
gaagcgactactacggcccatacttcgactactggggccagggcaccaccctgaccgtgtccagcgctagcac
caagggcccatcggtcttccccctggcaccctcctccaagagcacctctgggggcacagcggccctgggctgc
ctggtcaaggactacttccccgaaccggtgacggtgtcgtggaactcaggcgccctgaccagcggcgtgcaca
ccttcccggctgtcctacagtcctcaggactctactccctcagcagcgtggtgacagtgccctccagcagctt
gggcacccagacctacatctgcaacgtgaatcacaagcccagcaacaccaaggtggacaagaaagttgagccc
aaatcttgtgacaaaactcacacatgcccaccgtgcccagcacctgaactcctggggggaccgtcagtcttcc
tcttccccccaaaacccaaggacaccctcatgatctcccggacccctgaggtcacatgcgtggtggtggacgt
gagccacgaagaccctgaggtcaagttcaactggtacgtggacggcgtggaggtgcataatgccaagacaaag
ccgcgggaggagcagtacaacagcacgtaccgtgtggtcagcgtcctcaccgtcctgcaccaggactggctga
atggcaaggagtacaagtgcaaggtctccaacaaagccctcccagcccccatcgagaaaaccatctccaaagc
caaagggcagccccgagaaccacaggtgtacaccctgcccccatcccgggaggagatgaccaagaaccaggtc
agcctgacctgcctggtcaaaggcttctatcccagcgacatcgccgtggagtgggagagcaatgggcagccgg
agaacaactacaagaccacgcctcccgtgctggactccgacggctccttcttcctctacagcaagctcaccgt
ggacaagagcaggtggcagcaggggaacgtcttctcatgctccgtgatgcatgaggctctgcacaaccactac
acgcagaagagcctctccctgtctccgggtaaatgataa
(amino acids)
(SEQ ID NO: 454)
QVQLVQSGAEVKKPGASVKVSCKASGYTFTDYAMNWVRQAPGQGLEWMGVISTFSGNTNFNQKFKGRVTMTTD
TSTSTAYMELRSLRSDDTAVYYCARSDYYGPYFDYWGQGTTLTVSSASTKGPSVFPLAPSSKSTSGGTAALGC
LVKDYFPEPVTVSWNSGALTSGVHTFPAVLQSSGLYSLSSVVTVPSSSLGTQTYICNVNHKPSNTKVDKKVEP
KSCDKTHTCPPCPAPELLGGPSVFLFPPKPKDTLMISRTPEVTCVVVDVSHEDPEVKFNWYVDGVEVHNAKTK
PREEQYNSTYRVVSVLTVLHQDWLNGKEYKCKVSNKALPAPIEKTISKAKGQPREPQVYTLPPSREEMTKNQV
SLTCLVKGFYPSDIAVEWESNGQPENNYKTTPPVLDSDGSFFLYSKLTVDKSRWQQGNVFSCSVMHEALHNHY
TQKSLSLSPGK**
Humanized C3 IgG2 heavy chain sequence
(DNA)
(SEQ ID NO: 455)
caggttcagctggtgcagtctggagctgaggtgaagaagcctggggcctcagtgaaggtctcctgcaaggctt
ctggttacacctttaccgactacgccatgaactgggtgcgacaggcccctggacaagggcttgagtggatggg
agtgatcagcaccttcagcggtaacacaaacttcaaccagaagttcaagggcagagtcaccatgaccacagac
acatccacgagcacagcctacatggagctgaggagcctgagatctgacgacacggccgtgtattactgtgcga
gaagcgactactacggcccatacttcgactactggggccagggcaccaccctgaccgtgtccagcgcctccac
caagggcccatcggtcttccccctggcgccctgctccaggagcacctccgagagcacagccgccctgggctgc
ctggtcaaggactacttccccgaaccggtgacggtgtcgtggaactcaggcgctctgaccagcggcgtgcaca
ccttcccagctgtcctacagtcctcaggactctactccctcagcagcgtggtgaccgtgccctccagcaactt
cggcacccagacctacacctgcaacgtagatcacaagcccagcaacaccaaggtggacaagacagttgagcgc
aaatgttgtgtcgagtgcccaccgtgcccagcaccacctgtggcaggaccgtcagtcttcctcttccccccaa
aacccaaggacaccctcatgatctcccggacccctgaggtcacgtgcgtggtggtggacgtgagccacgaaga
ccccgaggtccagttcaactggtacgtggacggcgtggaggtgcataatgccaagacaaagccacgggaggag
cagttcaacagcacgttccgtgtggtcagcgtcctcaccgttgtgcaccaggactggctgaacggcaaggagt
acaagtgcaaggtctccaacaaaggcctcccagcccccatcgagaaaaccatctccaaaaccaaagggcagcc
ccgagaaccacaggtgtacaccctgcccccatcccgggaggagatgaccaagaaccaggtcagcctgacctgc
ctggtcaaaggcttctaccccagcgacatcgccgtggagtgggagagcaatgggcagccggagaacaactaca
agaccacacctcccatgctggactccgacggctccttcttcctctacagcaagctcaccgtggacaagagcag
gtggcagcaggggaacgtcttctcatgctccgtgatgcatgaggctctgcacaaccactacacgcagaagagc
ctctccctgtctccgggtaaatagtaa
(amino acids)
(SEQ ID NO: 456)
QVQLVQSGAEVKKPGASVKVSCKASGYTFTDYAMNWVRQAPGQGLEWMGVISTFSGNTNFNQKFKGRVTMTTD
TSTSTAYMELRSLRSDDTAVYYCARSDYYGPYFDYWGQGTTLTVSSASTKGPSVFPLAPCSRSTSESTAALGC
LVKDYFPEPVTVSWNSGALTSGVHTFPAVLQSSGLYSLSSVVTVPSSNFGTQTYTCNVDHKPSNTKVDKTVER
KCCVECPPCPAPPVAGPSVFLFPPKPKDTLMISRTPEVTCVVVDVSHEDPEVQFNWYVDGVEVHNAKTKPREE
QFNSTFRVVSVLTVVHQDWLNGKEYKCKVSNKGLPAPIEKTISKTKGQPREPQVYTLPPSREEMTKNQVSLTC
LVKGFYPSDIAVEWESNGQPENNYKTTPPMLDSDGSFFLYSKLTVDKSRWQQGNVFSCSVMHEALHNHYTQKS
LSLSPGK**
Humanized C3 heavy chain IgG1 gBLOCK sequence:
(DNA)
(SEQ ID NO: 457)
tgctctgggttccaggttccactggtgacgcggcccagccggcccaggttcagctggtgcagtctggagctga
ggtgaagaagcctggggcctcagtgaaggtctcctgcaaggcttctggttacacctttaccgactacgccatg
aactgggtgcgacaggcccctggacaagggcttgagtggatgggagtgatcagcaccttcagcggtaacacaa
acttcaaccagaagttcaagggcagagtcaccatgaccacagacacatccacgagcacagcctacatggagct
gaggagcctgagatctgacgacacggccgtgtattactgtgcgagaagcgactactacggcccatacttcgac
tactggggccagggcaccaccctgaccgtgtccagcgctagcaccaagggcccatcggtcttccccctggcac
cctcctccaagagcacctctgggggcacagcggccctgggctgcctggtcaaggactacttccccgaaccggt
gacggtgtcgtggaactcaggcgccctgaccagc
Mouse C3 Light Chain variable region sequence:
(DNA)
(SEQ ID NO: 458)
gatgttttgatgacccaaactccactctccctgcctgtcagtcttggagatcaagcctccatctcttgcagat
ctagtcagaccattgtacatagtaatggaaacacctatttagaatggtacctgcagaaaccaggccagtctcc
aaagctcctgatctacaaagtttccaaccgattttctggggtcccagacaggttcagtggcagtggatcaggg
acagatttcacactcaagatcaacagagtggaggctgaggatctgggagtttattactgctttcaaggttcac
atgttccattcacgttcggctcggggacaaagttggaaataaaa
(amino acids)
(SEQ ID NO: 459)
DVLMTQTPLSLPVSLGDQASISCRSSQTIVHSNGNTYLEWYLQKPGQSPKLLIYKVSNRFSGVPDRFSGSGSG
TDFTLKINRVEAEDLGVYYCFQGSHVPFTFGSGTKLEIK
Mouse C3 light chain variable framework region 1 (FWR1) sequence :
(DNA)
(SEQ ID NO: 460)
gatgttttgatgacccaaactccactctccctgcctgtcagtcttggagatcaagcctccatctcttgc
(amino acids)
(SEQ ID NO: 461)
DVLMTQTPLSLPVSLGDQASISC
Mouse C3 light chain variable complementarity determining regions 1
(CDR1) sequence :
(DNA)
(SEQ ID NO: 462)
agatctagtcagaccattgtacatagtaatggaaacacctatttagaa
(amino acids)
(SEQ ID NO: 463)
RSSQTIVHSNGNTYLE
Mouse C3 light chain variable framework region 2 (FWR2) sequence:
(DNA)
(SEQ ID NO: 464)
tggtacctgcagaaaccaggccagtctccaaagctcctgatctac
(amino acids)
(SEQ ID NO: 465)
WYLQKPGQSPKLLIY
Mouse C3 light chain variable complementarity determining regions 2
(CDR2) sequence:
(DNA)
(SEQ ID NO: 466)
aaagtttccaaccgattttct
(amino acids)
(SEQ ID NO: 467)
KVSNRFS
Mouse C3 light chain variable framework region 3 (FWR3) sequence:
(DNA)
(SEQ ID NO: 468)
ggggtcccagacaggttcagtggcagtggatcagggacagatttcacactcaagatcaacagagtggaggctg
aggatctgggagtttattactgc
(amino acids)
(SEQ ID NO: 469)
GVPDRFSGSGSGTDFTLKINRVEAEDLGVYYC
Mouse C3 light chain variable complementarity determining regions 3
(CDR3) sequence:
(DNA)
(SEQ ID NO: 470)
tttcaaggttcacatgttccattcacg
(amino acids)
(SEQ ID NO: 471)
FQGSHVPFT
IGKV2-29*03 light chain variable region sequence:
(DNA)
(SEQ ID NO: 472)
gatattgtgatgacccagactccactctctctgtccgtcacccctggacagccggcctccatctcctgcaagt
ctagtcagagcctcctgcatagtgatggaaagacctatttgtattggtacctgcagaagccaggccagtctcc
acagctcctgatctatgaagtttccagccggttctctggagtgccagataggttcagtggcagcgggtcaggg
acagatttcacactgaaaatcagccgggtggaggctgaggatgttggggtttattactgcatgcaaggtatac
accttcct
(amino acids)
(SEQ ID NO: 473)
DIVMTQTPLSLSVTPGQPASISCKSSQSLLHSDGKTYLYWYLQKPGQSPQLLIYEVSSRFSGVPDRFSGSGSG
TDFTLKISRVEAEDVGVYYCMQGIHLP
IGKV2-29*03 light chain variable framework region 1 (FWR1) acid sequence:
(DNA)
(SEQ ID NO: 474)
gatattgtgatgacccagactccactctctctgtccgtcacccctggacagccggcctccatctcctgc
(amino acids)
(SEQ ID NO: 475)
DIVMTQTPLSLSVTPGQPASISC
IGKV2-29*03 light chain variable complementarity determining regions 1
(CDR1) sequence:
(DNA)
(SEQ ID NO: 476)
aagtctagtcagagcctcctgcatagtgatggaaagacctatttgtat
(amino acids)
(SEQ ID NO: 477)
KSSQSLLHSDGKTYLY
IGKV2-29*03 light chain variable framework region 2 (FWR2) sequence:
(DNA)
(SEQ ID NO: 478)
tggtacctgcagaagccaggccagtctccacagctcctgatctat
(amino acids)
(SEQ ID NO: 479)
WYLQKPGQSPQLLIY
IGKV2-29*03 light chain variable complementarity determining regions 2
(CDR2) sequence:
(DNA)
(SEQ ID NO: 480)
gaagtttccagccggttc
(amino acids)
(SEQ ID NO: 481)
EVSSRFS
IGKV2-29*03 light chain variable framework region 3 (FWR3) sequence:
(DNA)
(SEQ ID NO: 482)
ggagtgccagataggttcagtggcagcgggtcagggacagatttcacactgaaaatcagccgggtggaggctg
aggatgttggggtttattactgc
(amino acids)
(SEQ ID NO: 483)
GVPDRFSGSGSGTDFTLKISRVEAEDVGVYYC
IGKV2-29*03 light chain variable complementarity determining regions3
(CDR3) sequence:
(DNA)
(SEQ ID NO: 484)
atgcaaggtatacaccttcct
(amino acids)
(SEQ ID NO: 485)
MQGIHLP
Humanized C3 light chain variable region sequence:
(DNA)
(SEQ ID NO: 486)
gatattgtgatgacccagactccactctctctgtccgtcacccctggacagccggcctccatctcct
gcaggtctagtcagaccattgtccatagtaatggaaacacctatttggagtggtacctgcagaagcc
aggccagtctccacagctcctgatctataaggtttccaaccggttctctggagtgccagataggttc
agtggcagcgggtcagggacagatttcacactgaaaatcagccgggtggaggctgaggatgttgggg
tttattactgcttccaaggtagccacgtgcctttcaccttcggcggagggaccaaggtggagatcaa
acgaact
(amino acids)
(SEQ ID NO: 487)
DIVMTQTPLSLSVTPGQPASISCRSSQTIVHSNGNTYLEWYLQKPGQSPQLLIYKVSNRFSGVPDRF
SGSGSGTDFTLKISRVEAEDVGVYYCFQGSHVPFTFGGGTKVEIKRT
Humanized C3 light chain variable framework region 1 (FWR1) acid
sequence:
(DNA)
(SEQ ID NO: 488)
gatattgtgatgacccagactccactctctctgtccgtcacccctggacagccggcctccatctcct
gc
(amino acids)
(SEQ ID NO: 489)
DIVMTQTPLSLSVTPGQPASISC
Humanized C3 light chain variable complementarity determining regions 1
(CDR1) sequence:
(DNA)
(SEQ ID NO: 490)
ggtctagtcagaccattgtccatagtaatggaaacacctatttggag
(amino acids)
(SEQ ID NO: 491)
RSSQTIVHSNGNTYLE
Humanized C3 light chain variable framework region 2 (FWR2) acid
sequence:
(DNA)
(SEQ ID NO: 492)
tggtacctgcagaagccaggccagtctccacagctcctgatctat
(amino acids)
(SEQ ID NO: 493)
WYLQKPGQSPQLLIY
Humanized C3 light chain variable complementarity determining regions 2
(CDR2) sequence:
(DNA)
(SEQ ID NO: 494)
aaggtttccaaccggttctct
(amino acids)
(SEQ ID NO: 495)
KVSNRFS
Humanized C3 light chain variable framework region 3 (FWR3) acid
sequence:
(DNA)
(SEQ ID NO: 496)
ggagtgccagataggttcagtggcagcgggtcagggacagatttcacactgaaaatcagccgggtggaggctg
aggatgttggggtttattactgc
(amino acids)
(SEQ ID NO: 497)
GVPDRFSGSGSGTDFTLKISRVEAEDVGVYYC
Humanized C3 light chain variable complementarity determining regions 3
(CDR3) sequence:
(DNA)
(SEQ ID NO: 498)
ttccaaggtagccacgtgcctttcacc
(amino acids)
(SEQ ID NO: 499)
FQGSHVPFT
Humanized C3 lambda light chain sequence
(DNA)
(SEQ ID NO: 500)
gatattgtgatgacccagactccactctctctgtccgtcacccctggacagccggcctccatctcctgcaggt
ctagtcagaccattgtccatagtaatggaaacacctatttggagtggtacctgcagaagccaggccagtctcc
acagctcctgatctataaggtttccaaccggttctctggagtgccagataggttcagtggcagcgggtcaggg
acagatttcacactgaaaatcagccgggtggaggctgaggatgttggggtttattactgcttccaaggtagcc
acgtgcctttcaccttcggcggagggaccaaggtggagatcaaacgaactggtcagcccaaggctgccccctc
ggtcactctgttcccgccctcctctgaggagcttcaagccaacaaggccacactggtgtgtctcataagtgac
ttctacccgggagccgtgacagtggcctggaaggcagatagcagccccgtcaaggcgggagtggagaccacca
caccctccaaacaaagcaacaacaagtacgcggccagcagctatctgagcctgacgcctgagcagtggaagtc
ccacagaagctacagctgccaggtcacgcatgaagggagcaccgtggagaagacagtggcccctacagaatgt
tcatagtaa
(amino acids)
(SEQ ID NO: 501)
DIVMTQTPLSLSVTPGQPASISCRSSQTIVHSNGNTYLEWYLQKPGQSPQLLIYKVSNRFSGVPDRFSGSGSG
TDFTLKISRVEAEDVGVYYCFQGSHVPFTFGGGTKVEIKRTGQPKAAPSVTLFPPSSEELQANKATLVCLISD
FYPGAVTVAWKADSSPVKAGVETTTPSKQSNNKYAASSYLSLTPEQWKSHRSYSCQVTHEGSTVEKTVAPTEC
S**
Humanized C3 Kappa light chain
(DNA)
(SEQ ID NO: 502)
gatattgtgatgacccagactccactctctctgtccgtcacccctggacagccggcctccatctcctgcaggt
ctagtcagaccattgtccatagtaatggaaacacctatttggagtggtacctgcagaagccaggccagtctcc
acagctcctgatctataaggtttccaaccggttctctggagtgccagataggttcagtggcagcgggtcaggg
acagatttcacactgaaaatcagccgggtggaggctgaggatgttggggtttattactgcttccaaggtagcc
acgtgcctttcaccttcggcggagggaccaaggtggagatcaaacgaactacggtggctgcaccatctgtctt
catcttcccgccatctgatgagcagttgaaatctggaactgcctctgttgtgtgcctgctgaataacttctat
cccagagaggccaaagtacagtggaaggtggataacgccctccaatcgggtaactcccaggagagtgtcacag
agcaggacagcaaggacagcacctacagcctcagcagcaccctgacgctgagcaaagcagactacgagaaaca
caaagtctacgcctgcgaagtcacccatcagggcctgagctcgcccgtcacaaagagcttcaacaggggagag
tgttagtaa
(amino acids)
(SEQ ID NO: 503)
DIVMTQTPLSLSVTPGQPASISCRSSQTIVHSNGNTYLEWYLQKPGQSPQLLIYKVSNRFSGVPDRFSGSGSG
TDFTLKISRVEAEDVGVYYCFQGSHVPFTFGGGTKVEIKRTTVAAPSVFIFPPSDEQLKSGTASVVCLLNNFY
PREAKVQWKVDNALQSGNSQESVTEQDSKDSTYSLSSTLTLSKADYEKHKVYACEVTHQGLSSPVTKSFNRGE
C**
Humanized C3 Kappa light gBLOCK sequence:
(DNA)
(SEQ ID NO: 504)
agctggctaggtaagcttggtaccgagctcggatccacgccaccatggagacagacacactcctgct
atgggtactgctgctctgggttccaggttccactggtgacgatattgtgatgacccagactccactc
tctctgtccgtcacccctggacagccggcctccatctcctgcaggtctagtcagaccattgtccata
gtaatggaaacacctatttggagtggtacctgcagaagccaggccagtctccacagctcctgatcta
taaggtttccaaccggttctctggagtgccagataggttcagtggcagcgggtcagggacagatttc
acactgaaaatcagccgggtggaggctgaggatgttggggtttattactgcttccaaggtagccacg
tgcctttcaccttcggcggagggaccaaggtggagatcaaacgaactacggtggctgcaccatctgt
cttcatcttcccgccatctgatgagcagttgaaatctggaactgcctctgttgtgtgcctgctgaat
aacttctatcccagagaggccaaagtacagtggaaggtggataacgccctccaatcgggtaactccc
aggagagtgtcacagagcaggacagcaaggacagcacctacagcctcagcagcaccctgacgctgag
caaagcagactacgagaaacacaaagtctacgcctgcgaagtcacccatcagggcctgagctcgccc
gtcacaaagagcttcaacaggggagagtgttagtaagtttaaacccgctgatcagcctcgactgtgc
cttctagttgc
Mouse C8 heavy chain variable region sequence
(DNA)
(SEQ ID NO: 505)
gaagtgatggtcgtggaaagcggcggtggtctggtaaagccggggggatcccttaagctttcttgcg
ccgcatccgggttcacgttctccggctatgccatgtcctgggtccgacagactcccgaaaagcgctt
ggaatgggtggccactatctcctccggggggacgtacatctactaccccgacagtgtgaaaggaaga
tttacaatatctcgcgacaacgcaaaaaataccttgtatcttcaaatgagctccctgcggtcagagg
acactgccatgtactattgcgcccgcctgggcggcgacaattactatgagtat
(amino acids)
(SEQ ID NO: 506)
EVMVVESGGGLVKPGGSLKLSCAASGFTFSGYAMSWVRQTPEKRLEWVATISSGGTYIYYPDSVKGRF
TISRDNAKNTLYLQMSSLRSEDTAMYYCARLGGDNYYEY
Mouse C8 heavy chain variable complementarity determining region 1 (CDR1)
sequence:
(DNA)
(SEQ ID NO: 507)
ggctatgccatgtcc
(amino acids)
(SEQ ID NO: 508)
GYAMS
Mouse C8 heavy chain variable complementarity determining region 2 (CDR2)
sequence:
(DNA)
(SEQ ID NO: 509)
actatctoctccggggggacgtacatctactaccccgacagtgtgaaagga
(amino acids)
(SEQ ID NO: 510)
TISSGGTYIYYPDSVKG
Mouse C8 heavy chain variable complementarity determining region 3 (CDR3)
sequence:
(DNA)
(SEQ ID NO: 511)
ctgggcggcgacaattactatgagtat
(amino acids)
(SEQ ID NO: 512)
LGGDNYYEY
IGHV3-21*04 heavy chain variable region sequence:
(DNA)
(SEQ ID NO: 513)
gaggtgcagctggtggagtctgggggaggcctggtcaagcctggggggtccctgagactctcctgtg
cagcctctggattcaccttcagtagctatagcatgaactgggtccgccaggctccagggaaggggct
ggagtgggtctcatccattagtagtagtagtagttacatatactacgcagactcagtgaagggccga
ttcaccatctccagagacaacgccaagaactcactgtatctgcaaatgaacagcctgagagccgagg
acacggccgtgtattactgtgcga
(amino acids)
(SEQ ID NO: 514)
EVQLVESGGGLVKPGGSLRLSCAASGFTFSSYSMNWVRQAPGKGLEWVSSISSSSSYIYYADSVKGRFTISRD
NAKNSLYLQMNSLRAEDTAVYYCAR
IGHV3-21*04 heavy chain variable framework region 1 (FWR1) sequence:
(DNA)
(SEQ ID NO: 515)
gaggtgcagctggtggagtctgggggaggcctggtcaagcctggggggtccctgagactctcctgtgcagcct
ctggattcaccttcagt
(amino acids)
(SEQ ID NO: 516)
EVQLVESGGGLVKPGGSLRLSCAASGFTFS
IGHV3-21*04 heavy chain variable complementarity determining regions 1
(CDR1) sequence:
(DNA)
(SEQ ID NO: 517)
agctatagcatgaac
(amino acids)
(SEQ ID NO: 518)
SYSMN
IGHV3-21*04 heavy chain variable framework region 2 (FWR2) sequence:
(DNA)
(SEQ ID NO: 519)
tgggtccgccaggctccagggaaggggctggagtgggtc
(amino acids)
(SEQ ID NO: 520)
WVRQAPGKGLEWV
IGHV3-21*04 heavy chain variable complementarity determining regions 2
(CDR2) sequence:
(DNA)
(SEQ ID NO: 521)
tcatccattagtagtagtagtagttacatatactacgcagactcagtgaagggc
(amino acids)
(SEQ ID NO: 522)
SSISSSSSYIYYADSVKG
IGHV3-21*04 heavy chain variable framework region 3 (FWR3) sequence:
(DNA)
(SEQ ID NO: 523)
cgattcaccatctccagagacaacgccaagaactcactgtatctgcaaatgaacagcctgagagccgaggaca
cggccgtgtattactgtgcga
(amino acids)
(SEQ ID NO: 524)
RFTISRDNAKNSLYLQMNSLRAEDTAVYYCAR
Humanized C8 heavy chain variable region sequence:
(DNA)
(SEQ ID NO: 525)
gaggtgcagctggtggagtctgggggaggcctggtcaagcctggggggtccctgagactctcctgtgcagcct
ctggattcaccttcagtggctatgccatgagctgggtccgccaggctccagggaaggggctggagtgggtctc
aaccattagtagtggcggaacctacatatactaccctgactcagtgaagggccgattcaccatctccagagac
aacgccaagaactcactgtatctgcaaatgaacagcctgagagccgaggacacggccgtgtattactgtgcga
gactgggcggcgataactattatgaatattggggcaaagggaccacggtcaccgtctcctcc
(amino acids)
(SEQ ID NO: 526)
EVQLVESGGGLVKPGGSLRLSCAASGFTFSGYAMSWVRQAPGKGLEWVSTISSGGTYIYYPDSVKGRFTISRD
NAKNSLYLQMNSLRAEDTAVYYCARLGGDNYYEYWGKGTTVTVSS
Humanized C8 heavy chain variable framework region 1 (FWR1) sequence:
(DNA)
(SEQ ID NO: 527)
gaggtgcagctggtggagtctgggggaggcctggtcaagcctggggggtccctgagactctcctgtgcagcct
ctggattcaccttcagt
(amino acids)
(SEQ ID NO: 528)
EVQLVESGGGLVKPGGSLRLSCAASGFTFS
Humanized C8 heavy chain variable complementarity determining region 1
(CDR1) sequence:
(DNA)
(SEQ ID NO: 529)
ggctatgccatgagc
(amino acids)
(SEQ ID NO: 530)
GYAMS
Humanized C8 heavy chain variable framework region 2 (FWR2) sequence:
(DNA)
(SEQ ID NO: 531)
tgggtccgccaggctccagggaaggggctggagtgggtctca
(amino acids)
(SEQ ID NO: 532)
WVRQAPGKGLEWVS
Humanized C8 heavy chain variable complementarity determining region 2
(CDR2) sequence:
(DNA)
(SEQ ID NO: 533)
accattagtagtggcggaacctacatatactaccctgactcagtgaagggc
(amino acids)
(SEQ ID NO: 534)
TISSGGTYIYYPDSVKG
Humanized C8 heavy chain variable framework region 3 (FWR3) sequence:
(DNA)
(SEQ ID NO: 535)
cgattcaccatctccagagacaacgccaagaactcactgtatctgcaaatgaacagcctgagagccgaggaca
cggccgtgtattactgtgcgaga
(amino acids)
(SEQ ID NO: 536)
RFTISRDNAKNSLYLQMNSLRAEDTAVYYCAR
Humanized C8 heavy chain variable complementarity determining region 3
(CDR3) sequence:
(DNA)
(SEQ ID NO: 537)
ctgggcggcgataactattatgaatat
(amino acids)
(SEQ ID NO: 538)
LGGDNYYEY
Humanized C8 IgG1 heavy chain sequence
(DNA)
(SEQ ID NO: 539)
gaggtgcagctggtggagtctgggggaggcctggtcaagcctggggggtccctgagactctcctgtgcagcct
ctggattcaccttcagtggctatgccatgagctgggtccgccaggctccagggaaggggctggagtgggtctc
aaccattagtagtggcggaacctacatatactaccctgactcagtgaagggccgattcaccatctccagagac
aacgccaagaactcactgtatctgcaaatgaacagcctgagagccgaggacacggccgtgtattactgtgcga
gactgggcggcgataactattatgaatattggggcaaagggaccacggtcaccgtctcctccgctagcaccaa
gggcccatcggtcttccccctggcaccctcctccaagagcacctctgggggcacagcggccctgggctgcctg
gtcaaggactacttccccgaaccggtgacggtgtcgtggaactcaggcgccctgaccagcggcgtgcacacct
tcccggctgtcctacagtcctcaggactctactccctcagcagcgtggtgacagtgccctccagcagcttggg
cacccagacctacatctgcaacgtgaatcacaagcccagcaacaccaaggtggacaagaaagttgagcccaaa
tcttgtgacaaaactcacacatgcccaccgtgcccagcacctgaactcctggggggaccgtcagtcttcctct
tccccccaaaacccaaggacaccctcatgatctcccggacccctgaggtcacatgcgtggtggtggacgtgag
ccacgaagaccctgaggtcaagttcaactggtacgtggacggcgtggaggtgcataatgccaagacaaagccg
cgggaggagcagtacaacagcacgtaccgtgtggtcagcgtcctcaccgtcctgcaccaggactggctgaatg
gcaaggagtacaagtgcaaggtctccaacaaagccctcccagcccccatcgagaaaaccatctccaaagccaa
agggcagccccgagaaccacaggtgtacaccctgcccccatcccgggaggagatgaccaagaaccaggtcagc
ctgacctgcctggtcaaaggcttctatcccagcgacatcgccgtggagtgggagagcaatgggcagccggaga
acaactacaagaccacgcctcccgtgctggactccgacggctccttcttcctctacagcaagctcaccgtgga
caagagcaggtggcagcaggggaacgtcttctcatgctccgtgatgcatgaggctctgcacaaccactacacg
cagaagagcctctccctgtctccgggtaaatgataa
(amino acids)
(SEQ ID NO: 540)
EVQLVESGGGLVKPGGSLRLSCAASGFTFSGYAMSWVRQAPGKGLEWVSTISSGGTYIYYPDSVKGRFTISRD
NAKNSLYLQMNSLRAEDTAVYYCARLGGDNYYEYWGKGTTVTVSSASTKGPSVFPLAPSSKSTSGGTAALGCL
VKDYFPEPVTVSWNSGALTSGVHTFPAVLQSSGLYSLSSVVTVPSSSLGTQTYICNVNHKPSNTKVDKKVEPK
SCDKTHTCPPCPAPELLGGPSVFLFPPKPKDTLMISRTPEVTCVVVDVSHEDPEVKFNWYVDGVEVHNAKTKP
REEQYNSTYRVVSVLTVLHQDWLNGKEYKCKVSNKALPAPIEKTISKAKGQPREPQVYTLPPSREEMTKNQVS
LTCLVKGFYPSDIAVEWESNGQPENNYKTTPPVLDSDGSFFLYSKLTVDKSRWQQGNVFSCSVMHEALHNHYT
QKSLSLSPGK**
Humanized C8 IgG2 heavy chain sequence
(DNA)
(SEQ ID NO: 541)
gaggtgcagctggtggagtctgggggaggcctggtcaagcctggggggtccctgagactctcctgtgcagcct
ctggattcaccttcagtggctatgccatgagctgggtccgccaggctccagggaaggggctggagtgggtctc
aaccattagtagtggcggaacctacatatactaccctgactcagtgaagggccgattcaccatctccagagac
aacgccaagaactcactgtatctgcaaatgaacagcctgagagccgaggacacggccgtgtattactgtgcga
gactgggcggcgataactattatgaatattggggcaaagggaccacggtcaccgtctcctccgcctccaccaa
gggcccatcggtcttccccctggcgccctgctccaggagcacctccgagagcacagccgccctgggctgcctg
gtcaaggactacttccccgaaccggtgacggtgtcgtggaactcaggcgctctgaccagcggcgtgcacacct
tcccagctgtcctacagtcctcaggactctactccctcagcagcgtggtgaccgtgccctccagcaacttcgg
cacccagacctacacctgcaacgtagatcacaagcccagcaacaccaaggtggacaagacagttgagcgcaaa
tgttgtgtcgagtgcccaccgtgcccagcaccacctgtggcaggaccgtcagtcttcctcttccccccaaaac
ccaaggacaccctcatgatctcccggacccctgaggtcacgtgcgtggtggtggacgtgagccacgaagaccc
cgaggtccagttcaactggtacgtggacggcgtggaggtgcataatgccaagacaaagccacgggaggagcag
ttcaacagcacgttccgtgtggtcagcgtcctcaccgttgtgcaccaggactggctgaacggcaaggagtaca
agtgcaaggtctccaacaaaggcctcccagcccccatcgagaaaaccatctccaaaaccaaagggcagccccg
agaaccacaggtgtacaccctgcccccatcccgggaggagatgaccaagaaccaggtcagcctgacctgcctg
gtcaaaggcttctaccccagcgacatcgccgtggagtgggagagcaatgggcagccggagaacaactacaaga
ccacacctcccatgctggactccgacggctccttcttcctctacagcaagctcaccgtggacaagagcaggtg
gcagcaggggaacgtcttctcatgctccgtgatgcatgaggctctgcacaaccactacacgcagaagagcctc
tccctgtctccgggtaaatagtaa
(amino acids)
(SEQ ID NO: 542)
EVQLVESGGGLVKPGGSLRLSCAASGFTFSGYAMSWVRQAPGKGLEWVSTISSGGTYIYYPDSVKGRFTISRD
NAKNSLYLQMNSLRAEDTAVYYCARLGGDNYYEYWGKGTTVTVSSASTKGPSVFPLAPCSRSTSESTAALGCL
VKDYFPEPVTVSWNSGALTSGVHTFPAVLQSSGLYSLSSVVTVPSSNFGTQTYTCNVDHKPSNTKVDKTVERK
CCVECPPCPAPPVAGPSVFLFPPKPKDTLMISRTPEVTCVVVDVSHEDPEVQFNWYVDGVEVHNAKTKPREEQ
FNSTFRVVSVLTVVHQDWLNGKEYKCKVSNKGLPAPIEKTISKTKGQPREPQVYTLPPSREEMTKNQVSLTCL
VKGFYPSDIAVEWESNGQPENNYKTTPPMLDSDGSFFLYSKLTVDKSRWQQGNVFSCSVMHEALHNHYTQKSL
SLSPGK**
Mouse C8 light chain variable region sequence
(DNA)
(SEQ ID NO: 543)
gacatcgtcattacgcagacccctgccagtcttgccgtttctctgggccagagggccactatcagttacaggg
cgagtaagtctgtgagtaccagcggctatagttacatgcattggaaccagcagaaaccgggacagccaccacg
cctgcttatttatctggtgtctaatcttgagtccggggtgcccgccaggttcagcggcagcggctctgggacc
gacttcacactcaacattcatccagtggaagaagaggacgctgctacatactactgtcaacacattcgggaac
tgaccaggagtgaa
(amino acids)
(SEQ ID NO: 544)
DIVITQTPASLAVSLGQRATISYRASKSVSTSGYSYMHWNQQKPGQPPRLLIYLVSNLESGVPARFS
GSGSGTDFTLNIHPVEEEDAATYYCQHIRELTRSE
Mouse C8 light chain variable complementarity determining region 1 (CDR1)
sequence:
(DNA)
(SEQ ID NO: 545)
agggcgagtaagtctgtgagtaccagcggctatagttacatgcat
(amino acids)
(SEQ ID NO: 546)
RASKSVSTSGYSYMH
Mouse C8 light chain variable complementarity determining region 2 (CDR2)
sequence:
(DNA)
(SEQ ID NO: 547)
ctggtgtctaatcttgagtcc
(amino acids)
(SEQ ID NO: 548)
LVSNLES
Mouse C8 light chain variable complementarity determining region 3 (CDR3)
sequence:
(DNA)
(SEQ ID NO: 549)
caacacattcgggaactgaccaggagtgaa
(amino acids)
(SEQ ID NO: 550)
QHIRELTRSE
NCBI germline z00023 light chain variable region sequence:
(DNA)
(SEQ ID NO: 551)
gacatcgtgatgacccagtctccagactccctggctgtgtctctgggcgagagggccaccatcaactgcaagt
ccagccagagtgttttatacagctccaacaataagaactacttagcttggtaccagcagaaaccaggacagcc
tcctaagctgctcatttactgggcatctacccgggaatccggggtccctgaccgattcagtggcagcgggtct
gggacagatttcactctcaccatcagcagcctgcaggctgaagatgtggcagtttattactgtcagcaatatt
atagtactcct
(amino acids)
(SEQ ID NO: 552)
DIVMTQSPDSLAVSLGERATINCKSSQSVLYSSNNKNYLAWYQQKPGQPPKLLIYWASTRESGVPDRFSGSGS
GTDFTLTISSLQAEDVAVYYCQQYYSTP
NCBI germline z00023 light chain variable framework region 1 (FWR1) acid
sequence:
(DNA)
(SEQ ID NO: 553)
gacatcgtgatgacccagtctccagactccctggctgtgtctctgggcgagagggccaccatcaactgc
(amino acids)
(SEQ ID NO: 554)
DIVMTQSPDSLAVSLGERATINC
NCBI germline z00023 light chain variable complementarity determining
regions 1 (CDR1) sequence:
(DNA)
(SEQ ID NO: 555)
aagtccagccagagtgttttatacagctccaacaataagaactacttagct
(amino acids)
(SEQ ID NO: 556)
KSSQSVLYSSNNKNYLA
NCBI germline z00023 light chain variable framework region 2 (FWR2)
sequence:
(DNA)
(SEQ ID NO: 557)
tggtaccagcagaaaccaggacagcctcctaagctgctcatttac
(amino acids)
(SEQ ID NO: 558)
WYQQKPGQPPKLLIY
NCBI germline z00023 light chain variable complementarity determining
regions 2 (CDR2) sequence:
(DNA)
(SEQ ID NO: 559)
tgggcatctacccgggaatcc
(amino acids)
(SEQ ID NO: 560)
WASTRES
NCBI germline z00023 light chain variable framework region 3 (FWR3)
sequence:
(DNA)
(SEQ ID NO: 561)
ggggtccctgaccgattcagtggcagcgggtctgggacagatttcactctcaccatcagcagcctgcaggctg
aagatgtggcagtttattactgt
(amino acids)
(SEQ ID NO: 562)
GVPDRFSGSGSGTDFTLTISSLQAEDVAVYYC
NCBI germline z00023 light chain variable complementarity determining
regions3 (CDR3) sequence:
(DNA)
(SEQ ID NO: 563)
cagcaatattatagtactcct
(amino acids)
(SEQ ID NO: 564)
QQYYSTP
Humanized C8 light chain variable region sequence
(DNA)
(SEQ ID NO: 565)
gacatcgtgatgacccagtctccagactccctggctgtgtctctgggcgagagggccaccatcaact
gcagggccagcaagagtgttagcaccagcggctacagctacatgcactggtaccagcagaaaccagg
acagcctcctaagctgctcatttacctggtgtctaacctggaatccggggtccctgaccgattcagt
ggcagcgggtctgggacagatttcactctcaccatcagcagcctgcaggctgaagatgtggcagttt
attactgtcaacacattcgggaactgaccaggagtgaattcggcggagggaccaaggtggagatcaa
acgaact
(amino acids)
(SEQ ID NO: 566)
DIVMTQSPDSLAVSLGERATINCRASKSVSTSGYSYMHWYQQKPGQPPKLLIYLVSNLESGVPDRFS
GSGSGTDFTLTISSLQAEDVAVYYCQHIRELTRSEFGGGTKVEIKRT
Humanized C8 light chain variable framework region 1 (FWR1)
sequence:
(DNA)
(SEQ ID NO: 567)
gacatcgtgatgacccagtctccagactccctggctgtgtctctgggcgagagggccaccatcaact
gc
(amino acids)
(SEQ ID NO: 568)
DIVMTQSPDSLAVSLGERATINC
Humanized C8 light chain variable complementarity determining region 1
(CDR1) sequence:
(DNA)
(SEQ ID NO: 569)
agggccagcaagagtgttagcaccagcggctacagctacatg
(amino acids)
(SEQ ID NO: 570)
RASKSVSTSGYSYM
Humanized C8 light chain variable framework region 2 (FWR2) sequence:
(DNA)
(SEQ ID NO: 571)
cactggtaccagcagaaaccaggacagcctcctaagctgctcatttac
(amino acids)
(SEQ ID NO: 572)
HWYQQKPGQPPKLLIY
Humanized C8 light chain variable complementarity determining region 2
(CDR2) sequence:
(DNA)
(SEQ ID NO: 573)
ctggtgtctaacctggaatcc
(amino acids)
(SEQ ID NO: 574)
LVSNLES
Humanized C8 light chain variable framework region 3 (FWR3) sequence:
(DNA)
(SEQ ID NO: 575)
ggggtccctgaccgattcagtggcagcgggtctgggacagatttcactctcaccatcagcagcctgcaggctg
aagatgtggcagtttattactgt
(amino acids)
(SEQ ID NO: 576)
GVPDRFSGSGSGTDFTLTISSLQAEDVAVYYC
Humanized C8 light chain variable complementarity determining region 3
(CDR3) sequence:
(DNA)
(SEQ ID NO: 577)
caacacattcgggaactgaccaggagtgaa
(amino acids)
(SEQ ID NO: 578)
QHIRELTRSE
Humanized C8 Lambda light chain sequence
(DNA)
(SEQ ID NO: 579)
gacatcgtgatgacccagtctccagactccctggctgtgtctctgggcgagagggccaccatcaactgcaggg
ccagcaagagtgttagcaccagcggctacagctacatgcactggtaccagcagaaaccaggacagcctcctaa
gctgctcatttacctggtgtctaacctggaatccggggtccctgaccgattcagtggcagcgggtctgggaca
gatttcactctcaccatcagcagcctgcaggctgaagatgtggcagtttattactgtcaacacattcgggaac
tgaccaggagtgaattcggcggagggaccaaggtggagatcaaacgaactggtcagcccaaggctgccccctc
ggtcactctgttcccgccctcctctgaggagcttcaagccaacaaggccacactggtgtgtctcataagtgac
ttctacccgggagccgtgacagtggcctggaaggcagatagcagccccgtcaaggcgggagtggagaccacca
caccctccaaacaaagcaacaacaagtacgcggccagcagctatctgagcctgacgcctgagcagtggaagtc
ccacagaagctacagctgccaggtcacgcatgaagggagcaccgtggagaagacagtggcccctacagaatgt
tcatagtaa
(amino acids)
(SEQ ID NO: 580)
DIVMTQSPDSLAVSLGERATINCRASKSVSTSGYSYMHWYQQKPGQPPKLLIYLVSNLESGVPDRFSGSGSGT
DFTLTISSLQAEDVAVYYCQHIRELTRSEFGGGTKVEIKRTGQPKAAPSVTLFPPSSEELQANKATLVCLISD
FYPGAVTVAWKADSSPVKAGVETTTPSKQSNNKYAASSYLSLTPEQWKSHRSYSCQVTHEGSTVEKTVAPTEC
S**
Humanized C8 Kappa light chain sequence
(DNA)
(SEQ ID NO: 581)
gacatcgtgatgacccagtctccagactccctggctgtgtctctgggcgagagggccaccatcaactgcaggg
ccagcaagagtgttagcaccagcggctacagctacatgcactggtaccagcagaaaccaggacagcctcctaa
gctgctcatttacctggtgtctaacctggaatccggggtccctgaccgattcagtggcagcgggtctgggaca
gatttcactctcaccatcagcagcctgcaggctgaagatgtggcagtttattactgtcaacacattcgggaac
tgaccaggagtgaattcggcggagggaccaaggtggagatcaaacgaactacggtggctgcaccatctgtctt
catcttcccgccatctgatgagcagttgaaatctggaactgcctctgttgtgtgcctgctgaataacttctat
cccagagaggccaaagtacagtggaaggtggataacgccctccaatcgggtaactcccaggagagtgtcacag
agcaggacagcaaggacagcacctacagcctcagcagcaccctgacgctgagcaaagcagactacgagaaaca
caaagtctacgcctgcgaagtcacccatcagggcctgagctcgcccgtcacaaagagcttcaacaggggagag
tgttagtaa
(amino acids)
(SEQ ID NO: 582)
DIVMTQSPDSLAVSLGERATINCRASKSVSTSGYSYMHWYQQKPGQPPKLLIYLVSNLESGVPDRFSGSGSGT
DFTLTISSLQAEDVAVYYCQHIRELTRSEFGGGTKVEIKRTTVAAPSVFIFPPSDEQLKSGTASVVCLLNNFY
PREAKVQWKVDNALQSGNSQESVTEQDSKDSTYSLSSTLTLSKADYEKHKVYACEVTHQGLSSPVTKSFNRGE
C**
Humanized C8 Kappa light chain gBLOCk sequence:
(DNA)
(SEQ ID NO: 583)
agctggctaggtaagcttggtaccgagctcggatccacgccaccatggagacagacacactcctgctatgggt
actgctgctctgggttccaggttccactggtgacgacatcgtgatgacccagtctccagactccctggctgtg
tctctgggcgagagggccaccatcaactgcagggccagcaagagtgttagcaccagcggctacagctacatgc
actggtaccagcagaaaccaggacagcctcctaagctgctcatttacctggtgtctaacctggaatccggggt
ccctgaccgattcagtggcagcgggtctgggacagatttcactctcaccatcagcagcctgcaggctgaagat
gtggcagtttattactgtcaacacattcgggaactgaccaggagtgaattcggcggagggaccaaggtggaga
tcaaacgaactacggtggctgcaccatctgtcttcatcttcccgccatctgatgagcagttgaaatctggaac
tgcctctgttgtgtgcctgctgaataacttctatcccagagaggccaaagtacagtggaaggtggataacgcc
ctccaatcgggtaactcccaggagagtgtcacagagcaggacagcaaggacagcacctacagcctcagcagca
ccctgacgctgagcaaagcagactacgagaaacacaaagtctacgcctgcgaagtcacccatcagggcctgag
ctcgcccgtcacaaagagcttcaacaggggagagtgttagtaagtttaaacccgctgatcagcctcgactgtg
ccttctagttgc
CAR-T E6 CD8 sequence:
(DNA)
(SEQ ID NO: 584)
gaggtccagctggttgagagtggcggtgggctggttaagcctggcggctccctgcggctgagctgcgccgcga
gtggatttactttcagccgatatgggatgagttgggtgcggcaagctcccgggaagaggctggaatgggtctc
aacaatctccggggggggcacttacatctattaccccgactcagtcaaggggagatttaccatttcacgagac
aacgctaagaataccctgtatttgcagatgaattctctgagagcagaggacacagctgtttactattgtaccc
gcgacaactatggcaggaactacgactacggtatggactattggggacaagggacattggttacagtgagcag
tggcggcgggggcagcggaggaggaggcagcggtggggggggcagcgagatagtgctcacgcagtcacccgcg
actctcagtctctcacctggggaacgagctaccctgacgtgctctgctacctcctcagtgtcatatattcact
ggtatcagcaacggcccgggcagtcccctagattgctcatttatagtacctctaatctggcctcaggtatccc
tgcacgattttctggatctggttcaggttctgattacaccctcactatctctagcctggagcctgaagacttt
gccgtttattactgccagcagaggtctagctccccattcacctttgggagtgggaccaaggttgaaattaaaa
cgacaaccccggcccccagaccaccaacgccagcccccaccatcgccagccaacccctgtctctgagaccaga
agcctgtaggcctgccgccggtggagctgtgcacacaagaggactggatttcgcctgtgatatctacatttgg
gccccgctcgcaggcacatgtggagtgctcctcctctccctggtgattaccctgtactgctgataa
(amino acids)
(SEQ ID NO: 585)
EVQLVESGGGLVKPGGSLRLSCAASGFTFSRYGMSWVRQAPGKRLEWVSTISGGGTYIYYPDSVKGR
FTISRDNAKNTLYLQMNSLRAEDTAVYYCTRDNYGRNYDYGMDYWGQGTLVTVSSGGGGSGGGGSGG
GGSEIVLTQSPATLSLSPGERATLTCSATSSVSYIHWYQQRPGQSPRLLIYSTSNLASGIPARFSGS
GSGSDYTLTISSLEPEDFAVYYCQQRSSSPFTFGSGTKVEIKTTTPAPRPPTPAPTIASQPLSLRPE
ACRPAAGGAVHTRGLDFACDIYIWAPLAGTCGVLLLSLVITLYC**
CAR-T C2 CD8 sequence:
(DNA)
(SEQ ID NO: 586)
gaagtgcagctcgtagagagtggcgggggactggtgaagcccggtggaagcctcagactcagttgcg
ccgcctcaggtttcactttttcaggttacgccatgtcctgggtaagacaggcaccggggaaaggact
cgagtgggtgtctactatcagctcaggaggcacttatatatattatcctgactctgtaaaaggccga
tttacgatttctcgcgacaatgcaaagaactccctctacctccaaatgaacagtcttagggcagaag
acactgctgtatactattgtgcacgcctcggcggcgacaactactacgagtactttgacgtgtgggg
gaaagggactaccgtgacagtttcaagcggaggaggtggctcaggtggaggcgggtcagggggggga
ggaagtgatattgtgctcacacaatccccagcctccctggctgtgtctcccggccaacgcgctacaa
ttacatgtcgggcctccaaaagcgtgagcaccagcggctacagctacatgcactggtatcaacagaa
accaggacaaccccccaaactgttgatttatctcgcttcaaacttggagtccggcgtgcctgcgcgc
ttttcagggagtgggagcggcacagattttacgctgactatcaaccccgtagaagcaaacgatacag
cgaattattattgtcaacattcccgggaactcccctttacgttcggcgggggcacaaaggtcgaaat
taagagaaccacgacaaccccggcccccagaccaccaacgccagcccccaccatcgccagccaaccc
ctgtctctgagaccagaagcctgtaggcctgccgccggtggagctgtgcacacaagaggactggatt
tcgcctgtgatatctacatttgggccccgctcgcaggcacatgtggagtgctcctcctctccctggt
gattaccctgtactgctgataa
(amino acids)
(SEQ ID NO: 587)
EVQLVESGGGLVKPGGSLRLSCAASGFTFSGYAMSWVRQAPGKGLEWVSTISSGGTYIYYPDSVKGR
FTISRDNAKNSLYLQMNSLRAEDTAVYYCARLGGDNYYEYFDVWGKGTTVTVSSGGGGSGGGGSGGG
GSDIVLTQSPASLAVSPGQRATITCRASKSVSTSGYSYMHWYQQKPGQPPKLLIYLASNLESGVPAR
FSGSGSGTDFTLTINPVEANDTANYYCQHSRELPFTFGGGTKVEIKRTTTTPAPRPPTPAPTIASQP
LSLRPEACRPAAGGAVHTRGLDFACDIYIWAPLAGTCGVLLLSLVITLYC**
CD8/4-1BB sequence
(DNA)
(SEQ ID NO: 588)
acgacaaccccggcccccagaccaccaacgccagcccccaccatcgccagccaacccctgtctctga
gaccagaagcctgtaggcctgccgccggtggagctgtgcacacaagaggactggatttcgcctgtga
tatctacatttgggccccgctcgcaggcacatgtggagtgctcctcctctccctggtgattaccctg
tactgcaaaaggggccgcaaaaaactcctttacatttttaagcagccttttatgaggccagtacaga
cgactcaagaggaagacgggtgctcatgccgctttcctgaggaggaggaaggagggtgcgaactgtg
ataa
(amino acids)
(SEQ ID NO: 589)
TTTPAPRPPTPAPTIASQPLSLRPEACRPAAGGAVHTRGLDFACDIYIWAPLAGTCGVLLLSLVITL
YCKRGRKKLLYIFKQPFMRPVQTTQEEDGCSCRFPEEEEGGCEL**
CD8/CD28 sequence
(DNA)
(SEQ ID NO: 590)
acgacaaccccggcccccagaccaccaacgccagcccccaccatcgccagccaacccctgtctctga
gaccagaagcctgtaggcctgccgccggtggagctgtgcacacaagaggactggatttcgcctgtga
tatctacatttgggccccgctcgcaggcacatgtggagtgctcctcctctccctggtgattaccctg
tactgcagaagcaagcggtctcggctcctgcattctgattacatgaacatgaccccaagaagaccag
gccccaccaggaaacattaccagccctacgctccgccacgcgacttcgctgcctaccggtcctgata
a
(amino acids)
(SEQ ID NO: 591)
TTTPAPRPPTPAPTIASQPLSLRPEACRPAAGGAVHTRGLDFACDIYIWAPLAGTCGVLLLSLVITL
YCRSKRSRLLHSDYMNMTPRRPGPTRKHYQPYAPPRDFAAYRS**
CD8/CD3z sequence:
(DNA)
(SEQ ID NO: 592)
acgacaaccccggcccccagaccaccaacgccagcccccaccatcgccagccaacccctgtctctga
gaccagaagcctgtaggcctgccgccggtggagctgtgcacacaagaggactggatttcgcctgtga
tatctacatttgggccccgctcgcaggcacatgtggagtgctcctcctctccctggtgattaccctg
tactgccgcgttaagttctcccgatcagccgacgcgcctgcttacaagcagggccagaaccaactgt
acaacgagctgaatctcggtagacgggaagagtacgacgtgttggacaaacggagaggccgcgaccc
agaaatgggcggcaagcctcgcaggaaaaacccccaggagggactgtacaatgagttgcagaaagat
aagatggcagaagcttatagcgagatcggaatgaagggggaaaggagacgagggaaaggacacgacg
gcctttatcagggcctgtccacagcaacaaaagatacgtatgacgccctccatatgcaggcacttcc
accacggtgataa
(amino acids)
(SEQ ID NO: 593)
TTTPAPRPPTPAPTIASQPLSLRPEACRPAAGGAVHTRGLDFACDIYIWAPLAGTCGVLLLSLVITL
YCRVKFSRSADAPAYKQGQNQLYNELNLGRREEYDVLDKRRGRDPEMGGKPRRKNPQEGLYNELQKD
KMAEAYSEIGMKGERRRGKGHDGLYQGLSTATKDTYDALHMQALPPR**
CD8/CD28/CD3z sequence:
(DNA)
(SEQ ID NO: 594)
acgacaaccccggcccccagaccaccaacgccagcccccaccatcgccagccaacccctgtctctga
gaccagaagcctgtaggcctgccgccggtggagctgtgcacacaagaggactggatttcgcctgtga
tatctacatttgggccccgctcgcaggcacatgtggagtgctcctcctctccctggtgattaccctg
tactgcagaagcaagcggtctcggctcctgcattctgattacatgaacatgaccccaagaagaccag
gccccaccaggaaacattaccagccctacgctccgccacgcgacttcgctgcctaccggtcccgcgt
taagttctcccgatcagccgacgcgcctgcttacaagcagggccagaaccaactgtacaacgagctg
aatctcggtagacgggaagagtacgacgtgttggacaaacggagaggccgcgacccagaaatgggcg
gcaagcctcgcaggaaaaacccccaggagggactgtacaatgagttgcagaaagataagatggcaga
agcttatagcgagatcggaatgaagggggaaaggagacgagggaaaggacacgacggcctttatcag
ggcctgtccacagcaacaaaagatacgtatgacgccctccatatgcaggcacttccaccacggtgat
aa
(amino acids)
(SEQ ID NO: 595)
TTTPAPRPPTPAPTIASQPLSLRPEACRPAAGGAVHTRGLDFACDIYIWAPLAGTCGVLLLSLVITL
YCRSKRSRLLHSDYMNMTPRRPGPTRKHYQPYAPPRDFAAYRSRVKFSRSADAPAYKQGQNQLYNEL
NLGRREEYDVLDKRRGRDPEMGGKPRRKNPQEGLYNELQKDKMAEAYSEIGMKGERRRGKGHDGLYQ
GLSTATKDTYDALHMQALPPR**
CD8/4-1BB/CD3z sequence:
(DNA)
(SEQ ID NO: 596)
acgacaaccccggcccccagaccaccaacgccagcccccaccatcgccagccaacccctgtctctga
gaccagaagcctgtaggcctgccgccggtggagctgtgcacacaagaggactggatttcgcctgtga
tatctacatttgggccccgctcgcaggcacatgtggagtgctcctcctctccctggtgattaccctg
tactgcaaaaggggccgcaaaaaactcctttacatttttaagcagccttttatgaggccagtacaga
cgactcaagaggaagacgggtgctcatgccgctttcctgaggaggaggaaggagggtgcgaactgcg
cgttaagttctcccgatcagccgacgcgcctgcttacaagcagggccagaaccaactgtacaacgag
ctgaatctcggtagacgggaagagtacgacgtgttggacaaacggagaggccgcgacccagaaatgg
gcggcaagcctcgcaggaaaaacccccaggagggactgtacaatgagttgcagaaagataagatggc
agaagcttatagcgagatcggaatgaagggggaaaggagacgagggaaaggacacgacggcctttat
cagggcctgtccacagcaacaaaagatacgtatgacgccctccatatgcaggcacttccaccacggt
gataa
(amino acids)
(SEQ ID NO: 597)
TTTPAPRPPTPAPTIASQPLSLRPEACRPAAGGAVHTRGLDFACDIYIWAPLAGTCGVLLLSLVITL
YCKRGRKKLLYIFKQPFMRPVQTTQEEDGCSCRFPEEEEGGCELRVKFSRSADAPAYKQGQNQLYNE
LNLGRREEYDVLDKRRGRDPEMGGKPRRKNPQEGLYNELQKDKMAEAYSEIGMKGERRRGKGHDGLY
QGLSTATKDTYDALHMQALPPR**
CD8/CD28/4-1BB/CD3z sequence:
(DNA)
(SEQ ID NO: 598)
acgacaaccccggcccccagaccaccaacgccagcccccaccatcgccagccaacccctgtctctga
gaccagaagcctgtaggcctgccgccggtggagctgtgcacacaagaggactggatttcgcctgtga
tatctacatttgggccccgctcgcaggcacatgtggagtgctcctcctctccctggtgattaccctg
tactgcagaagcaagcggtctcggctcctgcattctgattacatgaacatgaccccaagaagaccag
gccccaccaggaaacattaccagccctacgctccgccacgcgacttcgctgcctaccggtccaaaag
gggccgcaaaaaactcctttacatttttaagcagccttttatgaggccagtacagacgactcaagag
gaagacgggtgctcatgccgctttcctgaggaggaggaaggagggtgcgaactgcgcgttaagttct
cccgatcagccgacgcgcctgcttacaagcagggccagaaccaactgtacaacgagctgaatctcgg
tagacgggaagagtacgacgtgttggacaaacggagaggccgcgacccagaaatgggcggcaagcct
cgcaggaaaaacccccaggagggactgtacaatgagttgcagaaagataagatggcagaagcttata
gcgagatcggaatgaagggggaaaggagacgagggaaaggacacgacggcctttatcagggcctgtc
cacagcaacaaaagatacgtatgacgccctccatatgcaggcacttccaccacggtgataa
(amino acids)
(SEQ ID NO: 599)
TTTPAPRPPTPAPTIASQPLSLRPEACRPAAGGAVHTRGLDFACDIYIWAPLAGTCGVLLLSLVITL
YCRSKRSRLLHSDYMNMTPRRPGPTRKHYQPYAPPRDFAAYRSKRGRKKLLYIFKQPFMRPVQTTQE
EDGCSCRFPEEEEGGCELRVKFSRSADAPAYKQGQNQLYNELNLGRREEYDVLDKRRGRDPEMGGKP
RRKNPQEGLYNELQKDKMAEAYSEIGMKGERRRGKGHDGLYQGLSTATKDTYDALHMQALPPR**
CAR-T C3 4-1BB/CD3z sequence:
(DNA)
(SEQ ID NO: 600)
atggccctgcccgtgaccgctttgctgctccccctggcgctgctgctgcacgccgccaggccacagg
ttcagctggtgcagtctggagctgaggtgaagaagcctggggcctcagtgaaggtctcctgcaaggc
ttctggttacacctttaccgactacgccatgaactgggtgcgacaggcccctggacaagggcttgag
tggatgggagtgatcagcaccttcagcggtaacacaaacttcaaccagaagttcaagggcagagtca
ccatgaccacagacacatccacgagcacagcctacatggagctgaggagcctgagatctgacgacac
ggccgtgtattactgtgcgagaagcgactactacggcccatacttcgactactggggccagggcacc
accctgaccgtgtccagcggcggtggcggatccggcggtggcggatccggcggtggcggatccgata
ttgtgatgacccagactccactctctctgtccgtcacccctggacagccggcctccatctcctgcag
gtctagtcagaccattgtccatagtaatggaaacacctatttggagtggtacctgcagaagccaggc
cagtctccacagctcctgatctataaggtttccaaccggttctctggagtgccagataggttcagtg
gcagcgggtcagggacagatttcacactgaaaatcagccgggtggaggctgaggatgttggggttta
ttactgcttccaaggtagccacgtgcctttcaccttcggcggagggaccaaggtggagatcaaacga
actacgacaaccccggcccccagaccaccaacgccagcccccaccatcgccagccaacccctgtctc
tgagaccagaagcctgtaggcctgccgccggtggagctgtgcacacaagaggactggatttcgcctg
tgatatctacatttgggccccgctcgcaggcacatgtggagtgctcctcctctccctggtgattacc
ctgtactgcaaaaggggccgcaaaaaactcctttacatttttaagcagccttttatgaggccagtac
agacgactcaagaggaagacgggtgctcatgccgctttcctgaggaggaggaaggagggtgcgaact
gcgcgttaagttctcccgatcagccgacgcgcctgcttacaagcagggccagaaccaactgtacaac
gagctgaatctcggtagacgggaagagtacgacgtgttggacaaacggagaggccgcgacccagaaa
tgggcggcaagcctcgcaggaaaaacccccaggagggactgtacaatgagttgcagaaagataagat
ggcagaagcttatagcgagatcggaatgaagggggaaaggagacgagggaaaggacacgacggcctt
tatcagggcctgtccacagcaacaaaagatacgtatgacgccctccatatgcaggcacttccaccac
ggtgataa
(amino acids)
(SEQ ID NO: 601)
QVQLVQSGAEVKKPGASVKVSCKASGYTFTDYAMNWVRQAPGQGLEWMGVISTFSGNTNFNQKFKGR
VTMTTDTSTSTAYMELRSLRSDDTAVYYCARSDYYGPYFDYWGQGTTLTVSSGGGGSGGGGSGGGGS
DIVMTQTPLSLSVTPGQPASISCRSSQTIVHSNGNTYLEWYLQKPGQSPQLLIYKVSNRFSGVPDRF
SGSGSGTDFTLKISRVEAEDVGVYYCFQGSHVPFTFGGGTKVEIKRTTTTPAPRPPTPAPTIASQPL
SLRPEACRPAAGGAVHTRGLDFACDIYIWAPLAGTCGVLLLSLVITLYCKRGRKKLLYIFKQPFMRP
VQTTQEEDGCSCRFPEEEEGGCELRVKFSRSADAPAYKQGQNQLYNELNLGRREEYDVLDKRRGRDP
EMGGKPRRKNPQEGLYNELQKDKMAEAYSEIGMKGERRRGKGHDGLYQGLSTATKDTYDALHMQALP
PR**
C3 CAR gBLOCK 1 sequence:
(DNA)
(SEQ ID NO: 602)
atccacgctgttttgacctccatagaagattctagagctagctgtagagcttggtaccgagggccac
catggccctgcccgtgaccgctttgctgctccccctggcgctgctgctgcacgccgccaggccacag
gttcagctggtgcagtctggagctgaggtgaagaagcctggggcctcagtgaaggtctcctgcaagg
cttctggttacacctttaccgactacgccatgaactgggtgcgacaggcccctggacaagggcttga
gtggatgggagtgatcagcaccttcagcggtaacacaaacttcaaccagaagttcaagggcagagtc
accatgaccacagacacatccacgagcacagcctacatggagctgaggagcctgagatctgacgaca
cggccgtgtattactgtgcgagaagcgactactacggcccatacttcgactactggggccagggcac
caccctgaccgtgtccagcggcggtggcggatccggcggtggcggatccggcggtggcggatccgat
attgtgatgacccagactccactctctctgt
C3 CAR gBLOCK 2 sequence:
(DNA)
(SEQ ID NO: 603)
tattgtgatgacccagactccactctctctgtccgtcacccctggacagccggcctccatctcctgc
aggtctagtcagaccattgtccatagtaatggaaacacctatttggagtggtacctgcagaagccag
gccagtctccacagctcctgatctataaggtttccaaccggttctctggagtgccagataggttcag
tggcagcgggtcagggacagatttcacactgaaaatcagccgggtggaggctgaggatgttggggtt
tattactgcttccaaggtagccacgtgcctttcaccttcggcggagggaccaaggtggagatcaaac
gaactacgacaaccccggcccccagaccaccaacgccagcccccaccatcgccagccaacccctgtc
tctgagaccagaagcctgtaggcctgccgccggtggagctgtgcacacaagaggactggatttcgcc
tgtgatatctacatttgggccccgctcgcaggcacatgtg
E6 scFV gBLOCK 1 sequence:
(DNA)
(SEQ ID NO: 604)
tgctctgggttccaggttccactggtgacgcggcccagccggccgaggtgcagctggtggagtctgg
gggaggcctggtcaagcctggggggtccctgagactctcctgtgcagcctctggattcaccttcagt
aggtatggcatgagctgggtccgccaggctccagggaagaggctggagtgggtctcaaccattagtg
gcggaggcacctacatatactacccagactcagtgaagggccgattcaccatctccagagacaacgc
caagaacaccctgtatctgcaaatgaacagcctgagagccgaggacacggctgtgtattactgtacc
agagataactatggccgcaactatgattatggcatggattattggggccagggcaccctggtgaccg
tgagcagcggcggtggcggatccggcggtggcggatccggcggtggcggatcc
E6 scFV gBLOCK 2 sequence:
(DNA)
(SEQ ID NO: 605)
ggcggtggcggatccggcggtggcggatccggcggtggcggatccgaaattgtgttgacacagtctc
cagccaccctgtctttgtctccaggggaaagagccaccctcacctgcagcgccaccagcagtgttag
ctacatccactggtaccaacagaggcctggccagagccccaggctcctcatctatagcacctccaac
ctggccagcggcatcccagccaggttcagtggcagtgggtctgggagcgactacactctcaccatca
gcagcctagagcctgaagattttgcagtttattactgtcagcagcgtagcagctcccctttcacctt
tggcagcggcaccaaagtggaaattaaaaccggtcatcatcaccatcaccactgataagtttaaacc
cgctgatcagcctcgactgtgccttctagt
CAR-T C2 CD3z sequence:
(DNA)
(SEQ ID NO: 606)
atggccttgccagtgacggccctgctgctgccattggctcttctgttgcacgctgccaggcctgaagtgcagc
tcgtagagagtggcgggggactggtgaagcccggtggaagcctcagactcagttgcgccgcctcaggtttcac
tttttcaggttacgccatgtcctgggtaagacaggcaccggggaaaggactcgagtgggtgtctactatcagc
tcaggaggcacttatatatattatcctgactctgtaaaaggccgatttacgatttctcgcgacaatgcaaaga
actccctctacctccaaatgaacagtcttagggcagaagacactgctgtatactattgtgcacgcctcggcgg
cgacaactactacgagtactttgacgtgtgggggaaagggactaccgtgacagtttcaagcggaggaggtggc
tcaggtggaggcgggtcaggggggggaggaagtgatattgtgctcacacaatccccagcctccctggctgtgt
ctcccggccaacgcgctacaattacatgtcgggcctccaaaagcgtgagcaccagcggctacagctacatgca
ctggtatcaacagaaaccaggacaaccccccaaactgttgatttatctcgcttcaaacttggagtccggcgtg
cctgcgcgcttttcagggagtgggagcggcacagattttacgctgactatcaaccccgtagaagcaaacgata
cagcgaattattattgtcaacattcccgggaactcccctttacgttcggcgggggcacaaaggtcgaaattaa
gagaaccacgacaaccccggcccccagaccaccaacgccagcccccaccatcgccagccaacccctgtctctg
agaccagaagcctgtaggcctgccgccggtggagctgtgcacacaagaggactggatttcgcctgtgatatct
acatttgggccccgctcgcaggcacatgtggagtgctcctcctctccctggtgattaccctgtactgccgcgt
taagttctcccgatcagccgacgcgcctgcttacaagcagggccagaaccaactgtacaacgagctgaatctc
ggtagacgggaagagtacgacgtgttggacaaacggagaggccgcgacccagaaatgggcggcaagcctcgca
ggaaaaacccccaggagggactgtacaatgagttgcagaaagataagatggcagaagcttatagcgagatcgg
aatgaagggggaaaggagacgagggaaaggacacgacggcctttatcagggcctgtccacagcaacaaaagat
acgtatgacgccctccatatgcaggcacttccaccacggtgataa
(amino acids)
(SEQ ID NO: 607)
MALPVTALLLPLALLLHAARPEVQLVESGGGLVKPGGSLRLSCAASGFTFSGYAMSWVRQAPGKGLE
WVSTISSGGTYIYYPDSVKGRFTISRDNAKNSLYLQMNSLRAEDTAVYYCARLGGDNYYEYFDVWGK
GTTVTVSSGGGGSGGGGSGGGGSDIVLTQSPASLAVSPGQRATITCRASKSVSTSGYSYMHWYQQKP
GQPPKLLIYLASNLESGVPARFSGSGSGTDFTLTINPVEANDTANYYCQHSRELPFTFGGGTKVEIK
RTTTTPAPRPPTPAPTIASQPLSLRPEACRPAAGGAVHTRGLDFACDIYIWAPLAGTCGVLLLSLVI
TLYCRVKFSRSADAPAYKQGQNQLYNELNLGRREEYDVLDKRRGRDPEMGGKPRRKNPQEGLYNELQ
KDKMAEAYSEIGMKGERRRGKGHDGLYQGLSTATKDTYDALHMQALPPR**
CAR-T C2 CD28/CD3z sequence:
(DNA)
(SEQ ID NO: 608)
atggccttgccagtgacggccctgctgctgccattggctcttctgttgcacgctgccaggcctgaagtgcagc
tcgtagagagtggcgggggactggtgaagcccggtggaagcctcagactcagttgcgccgcctcaggtttcac
tttttcaggttacgccatgtcctgggtaagacaggcaccggggaaaggactcgagtgggtgtctactatcagc
tcaggaggcacttatatatattatcctgactctgtaaaaggccgatttacgatttctcgcgacaatgcaaaga
actccctctacctccaaatgaacagtcttagggcagaagacactgctgtatactattgtgcacgcctcggcgg
cgacaactactacgagtactttgacgtgtgggggaaagggactaccgtgacagtttcaagcggaggaggtggc
tcaggtggaggcgggtcaggggggggaggaagtgatattgtgctcacacaatccccagcctccctggctgtgt
ctcccggccaacgcgctacaattacatgtcgggcctccaaaagcgtgagcaccagcggctacagctacatgca
ctggtatcaacagaaaccaggacaaccccccaaactgttgatttatctcgcttcaaacttggagtccggcgtg
cctgcgcgcttttcagggagtgggagcggcacagattttacgctgactatcaaccccgtagaagcaaacgata
cagcgaattattattgtcaacattcccgggaactcccctttacgttcggcgggggcacaaaggtcgaaattaa
gagaaccacgacaaccccggcccccagaccaccaacgccagcccccaccatcgccagccaacccctgtctctg
agaccagaagcctgtaggcctgccgccggtggagctgtgcacacaagaggactggatttcgcctgtgatatct
acatttgggccccgctcgcaggcacatgtggagtgctcctcctctccctggtgattaccctgtactgcagaag
caagcggtctcggctcctgcattctgattacatgaacatgaccccaagaagaccaggccccaccaggaaacat
taccagccctacgctccgccacgcgacttcgctgcctaccggtcccgcgttaagttctcccgatcagccgacg
cgcctgcttacaagcagggccagaaccaactgtacaacgagctgaatctcggtagacgggaagagtacgacgt
gttggacaaacggagaggccgcgacccagaaatgggcggcaagcctcgcaggaaaaacccccaggagggactg
tacaatgagttgcagaaagataagatggcagaagcttatagcgagatcggaatgaagggggaaaggagacgag
ggaaaggacacgacggcctttatcagggcctgtccacagcaacaaaagatacgtatgacgccctccatatgca
ggcacttccaccacggtgataa
(amino acids)
(SEQ ID NO: 609)
MALPVTALLLPLALLLHAARPEVQLVESGGGLVKPGGSLRLSCAASGFTFSGYAMSWVRQAPGKGLE
WVSTISSGGTYIYYPDSVKGRFTISRDNAKNSLYLQMNSLRAEDTAVYYCARLGGDNYYEYFDVWGK
GTTVTVSSGGGGSGGGGSGGGGSDIVLTQSPASLAVSPGQRATITCRASKSVSTSGYSYMHWYQQKP
GQPPKLLIYLASNLESGVPARFSGSGSGTDFTLTINPVEANDTANYYCQHSRELPFTFGGGTKVEIK
RTTTTPAPRPPTPAPTIASQPLSLRPEACRPAAGGAVHTRGLDFACDIYIWAPLAGTCGVLLLSLVI
TLYCRSKRSRLLHSDYMNMTPRRPGPTRKHYQPYAPPRDFAAYRSRVKFSRSADAPAYKQGQNQLYN
ELNLGRREEYDVLDKRRGRDPEMGGKPRRKNPQEGLYNELQKDKMAEAYSEIGMKGERRRGKGHDGL
YQGLSTATKDTYDALHMQALPPR**
CAR-T C2 4-1BB/CD3z sequence:
(DNA)
(SEQ ID NO: 610)
atggccttgccagtgacggccctgctgctgccattggctcttctgttgcacgctgccaggcctgaagtgcagc
tcgtagagagtggcgggggactggtgaagcccggtggaagcctcagactcagttgcgccgcctcaggtttcac
tttttcaggttacgccatgtcctgggtaagacaggcaccggggaaaggactcgagtgggtgtctactatcagc
tcaggaggcacttatatatattatcctgactctgtaaaaggccgatttacgatttctcgcgacaatgcaaaga
actccctctacctccaaatgaacagtcttagggcagaagacactgctgtatactattgtgcacgcctcggcgg
cgacaactactacgagtactttgacgtgtgggggaaagggactaccgtgacagtttcaagcggaggaggtggc
tcaggtggaggcgggtcaggggggggaggaagtgatattgtgctcacacaatccccagcctccctggctgtgt
ctcccggccaacgcgctacaattacatgtcgggcctccaaaagcgtgagcaccagcggctacagctacatgca
ctggtatcaacagaaaccaggacaaccccccaaactgttgatttatctcgcttcaaacttggagtccggcgtg
cctgcgcgcttttcagggagtgggagcggcacagattttacgctgactatcaaccccgtagaagcaaacgata
cagcgaattattattgtcaacattcccgggaactcccctttacgttcggcgggggcacaaaggtcgaaattaa
gagaaccacgacaaccccggcccccagaccaccaacgccagcccccaccatcgccagccaacccctgtctctg
agaccagaagcctgtaggcctgccgccggtggagctgtgcacacaagaggactggatttcgcctgtgatatct
acatttgggccccgctcgcaggcacatgtggagtgctcctcctctccctggtgattaccctgtactgcaaaag
gggccgcaaaaaactcctttacatttttaagcagccttttatgaggccagtacagacgactcaagaggaagac
gggtgctcatgccgctttcctgaggaggaggaaggagggtgcgaactgcgcgttaagttctcccgatcagccg
acgcgcctgcttacaagcagggccagaaccaactgtacaacgagctgaatctcggtagacgggaagagtacga
cgtgttggacaaacggagaggccgcgacccagaaatgggcggcaagcctcgcaggaaaaacccccaggaggga
ctgtacaatgagttgcagaaagataagatggcagaagcttatagcgagatcggaatgaagggggaaaggagac
gagggaaaggacacgacggcctttatcagggcctgtccacagcaacaaaagatacgtatgacgccctccatat
gcaggcacttccaccacggtgataa
(amino acids)
(SEQ ID NO: 611)
MALPVTALLLPLALLLHAARPEVQLVESGGGLVKPGGSLRLSCAASGFTFSGYAMSWVRQAPGKGLE
WVSTISSGGTYIYYPDSVKGRFTISRDNAKNSLYLQMNSLRAEDTAVYYCARLGGDNYYEYFDVWGK
GTTVTVSSGGGGSGGGGSGGGGSDIVLTQSPASLAVSPGQRATITCRASKSVSTSGYSYMHWYQQKP
GQPPKLLIYLASNLESGVPARFSGSGSGTDFTLTINPVEANDTANYYCQHSRELPFTFGGGTKVEIK
RTTTTPAPRPPTPAPTIASQPLSLRPEACRPAAGGAVHTRGLDFACDIYIWAPLAGTCGVLLLSLVI
TLYCKRGRKKLLYIFKQPFMRPVQTTQEEDGCSCRFPEEEEGGCELRVKFSRSADAPAYKQGQNQLY
NELNLGRREEYDVLDKRRGRDPEMGGKPRRKNPQEGLYNELQKDKMAEAYSEIGMKGERRRGKGHDG
LYQGLSTATKDTYDALHMQALPPR**
CAR-T C2 OX40/CD3z sequence:
(DNA)
(SEQ ID NO: 612)
atggccttgccagtgacggccctgctgctgccattggctcttctgttgcacgctgccaggcctgaagtgcagc
tcgtagagagtggcgggggactggtgaagcccggtggaagcctcagactcagttgcgccgcctcaggtttcac
tttttcaggttacgccatgtcctgggtaagacaggcaccggggaaaggactcgagtgggtgtctactatcagc
tcaggaggcacttatatatattatcctgactctgtaaaaggccgatttacgatttctcgcgacaatgcaaaga
actccctctacctccaaatgaacagtcttagggcagaagacactgctgtatactattgtgcacgcctcggcgg
cgacaactactacgagtactttgacgtgtgggggaaagggactaccgtgacagtttcaagcggaggaggtggc
tcaggtggaggcgggtcaggggggggaggaagtgatattgtgctcacacaatccccagcctccctggctgtgt
ctcccggccaacgcgctacaattacatgtcgggcctccaaaagcgtgagcaccagcggctacagctacatgca
ctggtatcaacagaaaccaggacaaccccccaaactgttgatttatctcgcttcaaacttggagtccggcgtg
cctgcgcgcttttcagggagtgggagcggcacagattttacgctgactatcaaccccgtagaagcaaacgata
cagcgaattattattgtcaacattcccgggaactcccctttacgttcggcgggggcacaaaggtcgaaattaa
gagaaccacgacaaccccggcccccagaccaccaacgccagcccccaccatcgccagccaacccctgtctctg
agaccagaagcctgtaggcctgccgccggtggagctgtgcacacaagaggactggatttcgcctgtgatatct
acatttgggccccgctcgcaggcacatgtggagtgctcctcctctccctggtgattaccctgtactgccggag
ggaccagaggctgccccccgatgcccacaagccccctgggggaggcagtttccggacccccatccaagaggag
caggccgacgcccactccaccctggccaagatccgcgttaagttctcccgatcagccgacgcgcctgcttaca
agcagggccagaaccaactgtacaacgagctgaatctcggtagacgggaagagtacgacgtgttggacaaacg
gagaggccgcgacccagaaatgggcggcaagcctcgcaggaaaaacccccaggagggactgtacaatgagttg
cagaaagataagatggcagaagcttatagcgagatcggaatgaagggggaaaggagacgagggaaaggacacg
acggcctttatcagggcctgtccacagcaacaaaagatacgtatgacgccctccatatgcaggcacttccacc
acggtgataa
(amino acids)
(SEQ ID NO: 613)
MALPVTALLLPLALLLHAARPEVQLVESGGGLVKPGGSLRLSCAASGFTFSGYAMSWVRQAPGKGLE
WVSTISSGGTYIYYPDSVKGRFTISRDNAKNSLYLQMNSLRAEDTAVYYCARLGGDNYYEYFDVWGK
GTTVTVSSGGGGSGGGGSGGGGSDIVLTQSPASLAVSPGQRATITCRASKSVSTSGYSYMHWYQQKP
GQPPKLLIYLASNLESGVPARFSGSGSGTDFTLTINPVEANDTANYYCQHSRELPFTFGGGTKVEIK
RTTTTPAPRPPTPAPTIASQPLSLRPEACRPAAGGAVHTRGLDFACDIYIWAPLAGTCGVLLLSLVI
TLYCRRDQRLPPDAHKPPGGGSFRTPIQEEQADAHSTLAKIRVKFSRSADAPAYKQGQNQLYNELNL
GRREEYDVLDKRRGRDPEMGGKPRRKNPQEGLYNELQKDKMAEAYSEIGMKGERRRGKGHDGLYQGL
STATKDTYDALHMQALPPR**
CAR-T C2 CD28/OX40/CD3z sequence:
(DNA)
(SEQ ID NO: 614)
atggccttgccagtgacggccctgctgctgccattggctcttctgttgcacgctgccaggcctgaagtgcagc
tcgtagagagtggcgggggactggtgaagcccggtggaagcctcagactcagttgcgccgcctcaggtttcac
tttttcaggttacgccatgtcctgggtaagacaggcaccggggaaaggactcgagtgggtgtctactatcagc
tcaggaggcacttatatatattatcctgactctgtaaaaggccgatttacgatttctcgcgacaatgcaaaga
actccctctacctccaaatgaacagtcttagggcagaagacactgctgtatactattgtgcacgcctcggcgg
cgacaactactacgagtactttgacgtgtgggggaaagggactaccgtgacagtttcaagcggaggaggtggc
tcaggtggaggcgggtcaggggggggaggaagtgatattgtgctcacacaatccccagcctccctggctgtgt
ctcccggccaacgcgctacaattacatgtcgggcctccaaaagcgtgagcaccagcggctacagctacatgca
ctggtatcaacagaaaccaggacaaccccccaaactgttgatttatctcgcttcaaacttggagtccggcgtg
cctgcgcgcttttcagggagtgggagcggcacagattttacgctgactatcaaccccgtagaagcaaacgata
cagcgaattattattgtcaacattcccgggaactcccctttacgttcggcgggggcacaaaggtcgaaattaa
gagaaccacgacaaccccggcccccagaccaccaacgccagcccccaccatcgccagccaacccctgtctctg
agaccagaagcctgtaggcctgccgccggtggagctgtgcacacaagaggactggatttcgcctgtgatatct
acatttgggccccgctcgcaggcacatgtggagtgctcctcctctccctggtgattaccctgtactgcagaag
caagcggtctcggctcctgcattctgattacatgaacatgaccccaagaagaccaggccccaccaggaaacat
taccagccctacgctccgccacgcgacttcgctgcctaccggtcccggagggaccagaggctgccccccgatg
cccacaagccccctgggggaggcagtttccggacccccatccaagaggagcaggccgacgcccactccaccct
ggccaagatccgcgttaagttctcccgatcagccgacgcgcctgcttacaagcagggccagaaccaactgtac
aacgagctgaatctcggtagacgggaagagtacgacgtgttggacaaacggagaggccgcgacccagaaatgg
gcggcaagcctcgcaggaaaaacccccaggagggactgtacaatgagttgcagaaagataagatggcagaagc
ttatagcgagatcggaatgaagggggaaaggagacgagggaaaggacacgacggcctttatcagggcctgtcc
acagcaacaaaagatacgtatgacgccctccatatgcaggcacttccaccacggtgataa
(amino acids)
(SEQ ID NO: 615)
MALPVTALLLPLALLLHAARPEVQLVESGGGLVKPGGSLRLSCAASGFTFSGYAMSWVRQAPGKGLE
WVSTISSGGTYIYYPDSVKGRFTISRDNAKNSLYLQMNSLRAEDTAVYYCARLGGDNYYEYFDVWGK
GTTVTVSSGGGGSGGGGSGGGGSDIVLTQSPASLAVSPGQRATITCRASKSVSTSGYSYMHWYQQKP
GQPPKLLIYLASNLESGVPARFSGSGSGTDFTLTINPVEANDTANYYCQHSRELPFTFGGGTKVEIK
RTTTTPAPRPPTPAPTIASQPLSLRPEACRPAAGGAVHTRGLDFACDIYIWAPLAGTCGVLLLSLVI
TLYCRSKRSRLLHSDYMNMTPRRPGPTRKHYQPYAPPRDFAAYRSRRDQRLPPDAHKPPGGGSFRTP
IQEEQADAHSTLAKIRVKFSRSADAPAYKQGQNQLYNELNLGRREEYDVLDKRRGRDPEMGGKPRRK
NPQEGLYNELQKDKMAEAYSEIGMKGERRRGKGHDGLYQGLSTATKDTYDALHMQALPPR**
CAR-T E6 OX40/CD3z sequence:
(DNA)
(SEQ ID NO: 616)
atggccctgcccgtgaccgctttgctgctccccctggcgctgctgctgcacgccgccaggccagagg
tccagctggttgagagtggcggtgggctggttaagcctggcggctccctgcggctgagctgcgccgc
gagtggatttactttcagccgatatgggatgagttgggtgcggcaagctcccgggaagaggctggaa
tgggtctcaacaatctccggggggggcacttacatctattaccccgactcagtcaaggggagattta
ccatttcacgagacaacgctaagaataccctgtatttgcagatgaattctctgagagcagaggacac
agctgtttactattgtacccgcgacaactatggcaggaactacgactacggtatggactattgggga
caagggacattggttacagtgagcagtggcggcgggggcagcggaggaggaggcagcggtggggggg
gcagcgagatagtgctcacgcagtcacccgcgactctcagtctctcacctggggaacgagctaccct
gacgtgctctgctacctcctcagtgtcatatattcactggtatcagcaacggcccgggcagtcccct
agattgctcatttatagtacctctaatctggcctcaggtatccctgcacgattttctggatctggtt
caggttctgattacaccctcactatctctagcctggagcctgaagactttgccgtttattactgcca
gcagaggtctagctccccattcacctttgggagtgggaccaaggttgaaattaaaacgacaaccccg
gcccccagaccaccaacgccagcccccaccatcgccagccaacccctgtctctgagaccagaagcct
gtaggcctgccgccggtggagctgtgcacacaagaggactggatttcgcctgtgatatctacatttg
ggccccgctcgcaggcacatgtggagtgctcctcctctccctggtgattaccctgtactgccggagg
gaccagaggctgccccccgatgcccacaagccccctgggggaggcagtttccggacccccatccaag
aggagcaggccgacgcccactccaccctggccaagatccgcgttaagttctcccgatcagccgacgc
gcctgcttacaagcagggccagaaccaactgtacaacgagctgaatctcggtagacgggaagagtac
gacgtgttggacaaacggagaggccgcgacccagaaatgggcggcaagcctcgcaggaaaaaccccc
aggagggactgtacaatgagttgcagaaagataagatggcagaagcttatagcgagatcggaatgaa
gggggaaaggagacgagggaaaggacacgacggcctttatcagggcctgtccacagcaacaaaagat
acgtatgacgccctccatatgcaggcacttccaccacggtgataa
(amino acids)
(SEQ ID NO: 617)
MALPVTALLLPLALLLHAARPEVQLVESGGGLVKPGGSLRLSCAASGFTFSRYGMSWVRQAPGKRLE
WVSTISGGGTYIYYPDSVKGRFTISRDNAKNTLYLQMNSLRAEDTAVYYCTRDNYGRNYDYGMDYWG
QGTLVTVSSGGGGSGGGGSGGGGSEIVLTQSPATLSLSPGERATLTCSATSSVSYIHWYQQRPGQSP
RLLIYSTSNLASGIPARFSGSGSGSDYTLTISSLEPEDFAVYYCQQRSSSPFTFGSGTKVEIKTTTP
APRPPTPAPTIASQPLSLRPEACRPAAGGAVHTRGLDFACDIYIWAPLAGTCGVLLLSLVITLYCRR
DQRLPPDAHKPPGGGSFRTPIQEEQADAHSTLAKIRVKFSRSADAPAYKQGQNQLYNELNLGRREEY
DVLDKRRGRDPEMGGKPRRKNPQEGLYNELQKDKMAEAYSEIGMKGERRRGKGHDGLYQGLSTATKD
TYDALHMQALPPR**
CAR-T E6 CD28/OX40/CD3z sequence:
(DNA)
(SEQ ID NO: 618)
atggccctgcccgtgaccgctttgctgctccccctggcgctgctgctgcacgccgccaggccagagg
tccagctggttgagagtggcggtgggctggttaagcctggcggctccctgcggctgagctgcgccgc
gagtggatttactttcagccgatatgggatgagttgggtgcggcaagctcccgggaagaggctggaa
tgggtctcaacaatctccggggggggcacttacatctattaccccgactcagtcaaggggagattta
ccatttcacgagacaacgctaagaataccctgtatttgcagatgaattctctgagagcagaggacac
agctgtttactattgtacccgcgacaactatggcaggaactacgactacggtatggactattgggga
caagggacattggttacagtgagcagtggcggcgggggcagcggaggaggaggcagcggtggggggg
gcagcgagatagtgctcacgcagtcacccgcgactctcagtctctcacctggggaacgagctaccct
gacgtgctctgctacctcctcagtgtcatatattcactggtatcagcaacggcccgggcagtcccct
agattgctcatttatagtacctctaatctggcctcaggtatccctgcacgattttctggatctggtt
caggttctgattacaccctcactatctctagcctggagcctgaagactttgccgtttattactgcca
gcagaggtctagctccccattcacctttgggagtgggaccaaggttgaaattaaaacgacaaccccg
gcccccagaccaccaacgccagcccccaccatcgccagccaacccctgtctctgagaccagaagcct
gtaggcctgccgccggtggagctgtgcacacaagaggactggatttcgcctgtgatatctacatttg
ggccccgctcgcaggcacatgtggagtgctcctcctctccctggtgattaccctgtactgcagaagc
aagcggtctcggctcctgcattctgattacatgaacatgaccccaagaagaccaggccccaccagga
aacattaccagccctacgctccgccacgcgacttcgctgcctaccggtcccggagggaccagaggct
gccccccgatgcccacaagccccctgggggaggcagtttccggacccccatccaagaggagcaggcc
gacgcccactccaccctggccaagatccgcgttaagttctcccgatcagccgacgcgcctgcttaca
agcagggccagaaccaactgtacaacgagctgaatctcggtagacgggaagagtacgacgtgttgga
caaacggagaggccgcgacccagaaatgggcggcaagcctcgcaggaaaaacccccaggagggactg
tacaatgagttgcagaaagataagatggcagaagcttatagcgagatcggaatgaagggggaaagga
gacgagggaaaggacacgacggcctttatcagggcctgtccacagcaacaaaagatacgtatgacgc
cctccatatgcaggcacttccaccacggtgataa
(amino acids)
(SEQ ID NO: 619)
MALPVTALLLPLALLLHAARPEVQLVESGGGLVKPGGSLRLSCAASGFTFSRYGMSWVRQAPGKRLE
WVSTISGGGTYIYYPDSVKGRFTISRDNAKNTLYLQMNSLRAEDTAVYYCTRDNYGRNYDYGMDYWG
QGTLVTVSSGGGGSGGGGSGGGGSEIVLTQSPATLSLSPGERATLTCSATSSVSYIHWYQQRPGQSP
RLLIYSTSNLASGIPARFSGSGSGSDYTLTISSLEPEDFAVYYCQQRSSSPFTFGSGTKVEIKTTTP
APRPPTPAPTIASQPLSLRPEACRPAAGGAVHTRGLDFACDIYIWAPLAGTCGVLLLSLVITLYCRS
KRSRLLHSDYMNMTPRRPGPTRKHYQPYAPPRDFAAYRSRRDQRLPPDAHKPPGGGSFRTPIQEEQA
DAHSTLAKIRVKFSRSADAPAYKQGQNQLYNELNLGRREEYDVLDKRRGRDPEMGGKPRRKNPQEGL
YNELQKDKMAEAYSEIGMKGERRRGKGHDGLYQGLSTATKDTYDALHMQALPPR**
MUC1 truncated cytoplasmic sequence
(amino acids)
(SEQ ID NO: 620)
SNIKFRPGSVVVQLTLAFREGTINVHDVETQFNQYKTEAASRY
MUC1 truncated cytoplasmic sequence
(amino acids)
(SEQ ID NO: 621)
SVVVQLTLAFREGTINVHDVETQFNQYKTEAASRY
MUC1 truncated cytoplasmic sequence
(amino acids)
(SEQ ID NO: 622)
LTLAFREGTINVHDVETQFNQY
MUC1 truncated cytoplasmic sequence
(amino acids)
(SEQ ID NO: 623)
SNIKFRPGSVVVQLTLAFREGTIN
Primers
(SEQ ID NO: 624)
attctaagcttgggccaccatggaactg
(SEQ ID NO: 625)
tctagagtttaaacttactatttacccggagacagggagag
(SEQ ID NO: 626)
agtatggcccagccggccgaggtgcagctggtggagtctgg
(SEQ ID NO: 627)
tagaaggcacagtcgaggctgatcag
(SEQ ID NO: 628)
attctaagcttgggccaccatggaagc
(SEQ ID NO: 629)
tctagagtttaaacttactaacactctcccctgttgaagc
(SEQ ID NO: 630)
agtatggcccagccggccgaaattgtgttgacacagtctccag
(SEQ ID NO: 631)
tagaaggcacagtcgaggctgatcag
(SEQ ID NO: 632)
actgtcatatggaggtgcagctggtggagtctg
(SEQ ID NO: 633)
actgtctcgagtttaatttccactttggtgccgctgc
(SEQ ID NO: 634)
actgtcatatggaggtgcagctggtggagtctg
(SEQ ID NO: 635)
actgtaccggttttaatttccactttggtgccgctgc
(SEQ ID NO: 636)
cttcttcctcaggagcaagctcaccgtgg
(SEQ ID NO: 637)
gagccgtcggagtccagc
(SEQ ID NO: 638)
gcacctgaactcctgggg
(SEQ ID NO: 639)
tttaatttccactttggtgccg
(SEQ ID NO: 640)
cgcggctagcttaagcttggtaccgagggcca
(SEQ ID NO: 641)
cgcggcggccgcctgatcagcgggtttaaacttatc

[0245] The present invention is not to be limited in scope by the specific embodiments described herein. Indeed, various modifications of the invention in addition to those described herein will become apparent to those skilled in the art from the foregoing description and accompanying figures. Such modifications are intended to fall within the scope of the appended claims. The following examples are offered by way of illustration of the present invention, and not by way of limitation.

### EXAMPLES

### Example 1—ELISA Competition with NME1 and NME7

[0246] PSMGFR peptide was covalently coupled to BSA using Imject Maleimide activated BSA kit (Thermo Fisher). PSMGFR peptide coupled BSA was diluted to 7.5 ug/mL in 0.1M carbonate/bicarbonate buffer pH 9.6 and 50 uL was added to each well of a 96 well plate. After overnight incubation at 4° C., the plate was wash twice with PBS-T and a 3% BSA solution was added to block remaining binding site on the well. After 1 h at RT the plate was washed twice with PBS-T and NME1 or NME7, diluted in PBS-T+1% BSA, was added at saturating concentration. After 1 h at RT the plate was washed 3× with PBS-T and anti-MUC1* antibody (or antibody fragments), diluted in PBS-T+1% BSA, was added (5× molar excess compared to NME1/NME7). After 1 h at RT the plate was washed 3× with PBS-T and goat anti HisTag-HRP, diluted in PBS-T+1% BSA, was added at 1/10000 dilution. After 1 h at RT the plate was washed 3× with PBS-T and remaining NME1 or NME7 bound to the PSMGFR peptide was measured at 415 nm using a ABTS solution (Thermo Fisher).

### Example 2—Humanization of Anti-MUC1* Extracellular Domain Monoclonal Antibodies

[0247] We generated humanized antibodies that bind to the extracellular domain of MUC1* by a process called complementarity determining region, ‘CDR’, grafting. First, homology searches were performed to independently align the heavy chain variable region and light chain variable region nucleotides sequences of mouse monoclonal anti-MUC1* antibody (E6 HC SEQ ID NOS:12-13; LC SEQ ID NOS:65-66 and MN-C2 HC SEQ ID NO:118-119; LC SEQ ID NO: 168-169) against a repertoire of human antibody sequences (IMGT, the international ImMunoGeneTics information system). The sequences with the highest homology were selected. IGHV3-21*01 is a human IgG heavy chain variable region sequence with 82.9% (DNA) and 74.5% (amino acids) identity to Mouse MN-E6 heavy chain variable region. IGKV3-11*02 is a human IgG light chain variable region sequence with 68.8% (DNA) and 61.1% (amino acids) identity to Mouse MN-E6 light chain variable region. IGHV3-21*04 is a human IgG heavy chain variable region sequence with 85% (DNA) and 81.6% (amino acids) identity to Mouse MN-C2 heavy chain variable region. IGKV7-3*01 is a human IgG light chain variable region sequence with 76.9% (DNA) and 71.3% (amino acids) identity to Mouse MN-C2 light chain variable region. Second, a model of the mouse scFv was generated to select and keep the mouse residues important for the stability of the CDR and framework. Finally, CDRs from the human germlines were replaced by the corresponding mouse CDRs.

[0248] Humanized MN-E6 IgG2 Heavy Chain Cloning

[0249] The Kozak consensus sequence followed by the IGHV3-21*03 leader sequence, the humanized MN-E6 heavy chain variable region and the constant region of human IgG2 was synthesized by our request by GenScript, NJ (SEQ ID NOS:52-53. The cDNA was amplified by polymerase chain reaction (PCR) using the following primer: 5′-ATTCTAAGCTTGGGCCACCATGGAACTG-3′ (SEQ ID NO:624) and 5′-TCTAGAGTTTAAACTTACTATTTACCCGGAGACAGGGAGAG-3′ (SEQ ID NO:625). After digestion with HindIII and PmeI restriction enzymes (New England Biolabs), the purified fragment was cloned into the pCDNA 3.1 V5 vector (Life Technologies) digested with the same restriction enzymes.

[0250] Humanized MN-E6 heavy chain cDNA was amplified by polymerase chain reaction (PCR) using the following primer: 5′-AGTATGGCCCAGCCGGCCGAGGTGCAGCTGGTGGAGTCTGG-3′ (SEQ ID NO:626) and 5′-TAGAAGGCACAGTCGAGGCTGATCAG-3′ (SEQ ID NO:627). After digestion with SfiI and PmeI restriction enzymes (New England Biolabs), the purified fragment was cloned into the pSECTag2 vector (Life Technologies) digested with the same restriction enzymes.

[0251] Humanized MN-E6 Kappa Light Chain Cloning

[0252] The Kozak consensus sequence followed by the IGHV3-11*02 leader sequence, the humanized MN-E6 light chain variable region and the constant region of human Kappa light chain was synthesized by our request by GenScript, NJ (SEQ ID NOS: 107-108). The cDNA was amplified by polymerase chain reaction (PCR) using the following primer: 5′-ATTCTAAGCTTGGGCCACCATGGAAGC-3′ (SEQ ID NO:628) and 5′-TCTAGAGTTTAAACTTACTAACACTCTCCCCTGTTGAAGC-3′ (SEQ ID NO:629). After digestion with HindIII and PmeI restriction enzymes (New England Biolabs), the purified fragment was cloned into the pCDNA 3.1 V5 vector (Life Technologies) digested with the same restriction enzymes.

[0253] Humanized MN-E6 light chain cDNA was amplified by polymerase chain reaction (PCR) using the following primer: 5′-AGTATGGCCCAGCCGGCCGAAATTGTGTTGACACAGTCTCCAG-3′ (SEQ ID NO:630) and 5′-TAGAAGGCACAGTCGAGGCTGATCAG-3′ (SEQ ID NO:631). After digestion with SfiI and PmeI restriction enzymes (New England Biolabs), the purified fragment was cloned into the pSECTag2 vector (Life Technologies) digested with the same restriction enzymes.

[0254] Humanized MN-E6 IgG1 Heavy Chain Cloning

[0255] Humanized MN-E6 IgG2 constructs (pCDNA 3.1 V5 and pSECTag2) were digested with BstEII and PmeI (New England Biolabs) to remove the IgG2 heavy chain constant region. The vector with humanized MN-E6 heavy chain variable region was purified. Human IgG1 heavy chain constant region was synthesized by our request by IDT, IA (SEq ID NOS: 60-61). Both gBLOCKS and the purified vector with humanized MN-E6 variable region were ligated using the Gibson assembly cloning kit (New England Biolabs).

[0256] Humanized MN-E6 Lambda Light Chain Cloning

[0257] Humanized MN-E6 kappa light chain constructs (pCDNA 3.1 V5 vector and pSECTag2 vector) were digested with KpnI and PmeI (New England Biolabs) to remove the kappa light chain constant region. The vector with humanized MN-E6 light chain variable region was purified. Human lambda light chain constant region was synthesized by our request by IDT, IA (SEQ ID NO: 115). Both, gBLOCK and the purified vector with humanized MN-E6 light chain variable region were ligated using the Gibson assembly cloning kit (New England Biolabs).

[0258] Humanized MN-C2 IgG1 and IgG2 Heavy Chain Cloning

[0259] Humanized MN-E6 IgG1 and IgG2 heavy chain in pSECTag2 were digested with SfiI and AgeI to remove the MN-E6 variable region. Humanized MN-E6 IgG1 and IgG2 heavy chain in pCDNA 3.1 V5 were digested with HindIII and AgeI to remove the MN-E6 variable region The vectors with human IgG1 or IgG2 constant region were purified. Humanized MN-C2 heavy chains were synthesized by our request by IDT, IA (SEQ ID NOS:160 and 165). Sequence to be cloned into pCDNA 3.1 V5 contains in 5′ the murine Ig kappa chain leader sequence (SEQ ID NO 160). Both, gBLOCK and purified vector with human IgG1 or IgG2 constant region were ligated using the Gibson assembly cloning kit (New England Biolabs).

[0260] Humanized MN-C2 Kappa/Lambda Light Chain Cloning

[0261] Two humanized MN-C2 variable region fused to the kappa light chain constant region and two humanized MN-C2 variable region fused to the lambda light chain constant region were synthesized by our request by IDT, IA (SEQ ID NOS: 210 and 213 and SEQ ID NOS: 216 and 219, respectively). pCDNA 3.1 V5 was digested with HindIII and PmeI restriction enzymes (New England Biolabs) and pSEC Tag2 was digested with SfiI and PmeI restriction enzymes (New England Biolabs). Both plasmids were then purified. SEQ ID NOS: 210 and 216 were ligated into digested pCDNA 3.1 V5 and SEQ ID NOS: 213 and 219 were ligated into digested pSEC Tag2 using the Gibson assembly cloning kit (New England Biolabs).

[0262] Humanized C3 IgG1 Heavy Chain Cloning

[0263] Humanized E6 IgG1 construct (pSECTag2) was digested with SfiI and AgeI (New England Biolabs) to remove the E6 heavy chain variable region. The vector without humanized E6 heavy chain variable region was purified. Humanized C3 heavy chain variable region was synthesized by our request by IDT, IA (SEQ ID NO:457). gBLOCK and the purified vector were ligated using the Gibson assembly cloning kit (New England Biolabs).

[0264] Humanized C3 Kappa Light Chain Cloning

[0265] pEF V5-His was digested with BamHI and PmeI (New England Biolabs) and purified. Humanized C3 kappa light chain was synthesized by our request by IDT, IA (SEq ID NO:504). Both, gBLOCK and the purified vector were ligated using the Gibson assembly cloning kit (New England Biolabs).

[0266] Humanized C8 Kappa Light Chain Cloning

[0267] pEF V5-His was digested with BamHi and PmeI (New England Biolabs) and purified. Humanized C8 kappa light chain was synthesized by our request by IDT, IA (SEq ID NO:583). Both, gBLOCK and the purified vector were ligated using the Gibson assembly cloning kit (New England Biolabs).

### Example 3—Cloning of Humanized scFV of Anti-MUC1* Extracellular Domain Antibodies

[0268] Humanized E6 scFV Cloning:

[0269] pSEC Tag2 was digested with SfiI and PmeI (New England Biolabs) and purified. Humanized E6 scFV gBLOCKS were synthesized by our request by IDT, IA (SEQ ID NOS: 604-605). Both, gBLOCKs and the purified vector were ligated using the Gibson assembly cloning kit (New England Biolabs).

[0270] Humanized E6 scFV cDNA was amplified by polymerase chain reaction (PCR) using the following primers: 5-ACTGTCATATGGAGGTGCAGCTGGTGGAGTCTG-3′ (SEQ ID NO:632) and 5′-ACTGTCTCGAGTTTAATTTCCACTTTGGTGCCGCTGC-3′ (SEQ ID NO:633). After digestion with NdeI and XhoI restriction enzymes (New England Biolabs), the purified fragment was cloned into the pET21b vector (Novagen) digested with the same restriction enzymes. Humanized E6 scFV cDNA was cloned 5′ of the Histidine Tag for protein purification.

[0271] Humanized E6 scFV cDNA was amplified by polymerase chain reaction (PCR) using the following primers: 5-ACTGTCATATGGAGGTGCAGCTGGTGGAGTCTG-3′ (SEQ ID NO:634) and 5′-ACTGTACCGGTTTTAATTTCCACTTTGGTGCCGCTGC-3′ (SEQ ID NO:635). After digestion with NdeI and AgeI restriction enzymes (New England Biolabs), the purified fragment was cloned into a modified pET21b vector (Novagen) digested with the same restriction enzymes. The vector was modified to include the StrepTag2 sequence followed by 2 stop codons 5′ of the Histidine Tag. Humanized E6 scFV cDNA was cloned 5′ of the StrepTag2 for protein purification.

[0272] Humanized E6, C2, C3 and C8 scFV-Fc Cloning

[0273] Humanized E6 IgG1 construct (pSECTag2) was digested with SfiI and SacII (New England Biolabs) to remove the E6 heavy chain variable region and part of the IgG1 heavy chain constant region. The vector without humanized E6 heavy chain variable region was purified. Humanized E6, C2, C3 and C8 scFV gBLOCKS were synthesized by our request by IDT, IA (SEQ ID NO:258-259, 262-263, 266-267 and 270-271). E6, C2, C3 and C8 gBLOCKS and the purified vector were ligated using the Gibson assembly cloning kit (New England Biolabs) to assemble the corresponding scFV in frame of the human IgG1 Fc region.

[0274] Humanized E6 scFV-Fc Y407R Cloning

[0275] Humanized E6 scFV-Fc tyrosine 407 was mutated to an arginine (Y407R) by site directed mutagenesis. The Q5 site directed mutagenesis kit (NEB) was used with the following primers: 5′-CTTCTTCCTCAGGAGCAAGCTCACCGTGG-3′ (SEQ ID NO:636) and 5′-GAGCCGTCGGAGTCCAGC-3′ (SEQ ID NO:637)

[0276] Humanized E6 scFV-Fc Hingeless Cloning

[0277] Hinge region of humanized E6 scFV-Fc was removed by site directed mutagenesis. The Q5 site directed mutagenesis kit (NEB) was used with the following primers: 5′-GCACCTGAACTCCTGGGG-3′ (SEQ ID NO:638) and 5′-TTTAATTTCCACTTTGGTGCCG-3′ (SEQ ID NO:639)

### Example 4—Cloning of CAR-T of Anti-MUC1* Extracellular Domain Antibodies

[0278] CAR E6 CD28/4-1BB/CD3z Cloning:

[0279] pCDNA 3.1 V5 was digested with KpnI and PmeI (New England Biolabs) and purified. Full CAR-T E6 (CD8/CD28/4-1BB/CD3z) gBLOCK was synthesized by our request by IDT, IA (SEq ID NO:305). Both, gBLOCK and the purified vector were ligated using the Gibson assembly cloning kit (New England Biolabs).

[0280] CAR E6 CD3z Cloning:

[0281] pCDNA 3.1 V5 CAR-T E6 CD8/CD28/4-1BB/CD3z was digested with EcoRV and PmeI (New England Biolabs) to remove cytoplasmic domains. The vector without cytoplasmic domains was purified. CAR-T E6 CD8/CD3z gBLOCK was synthesized by our request by IDT, IA (SEq ID NO:296). Both, gBLOCK and the purified vector were ligated using the Gibson assembly cloning kit (New England Biolabs).

[0282] CAR E6 CD28/CD3z Cloning:

[0283] pCDNA 3.1 V5 CAR-T E6 CD8/CD28/4-1BB/CD3z was digested with EcoRV and PmeI (New England Biolabs) to remove cytoplasmic domains. The vector without cytoplasmic domains was purified. CAR-T E6 CD8/CD28/CD3z gBLOCK was synthesized by our request by IDT, IA (SEq ID NO:299). Both, gBLOCK and the purified vector were ligated using the Gibson assembly cloning kit (New England Biolabs).

[0284] CAR E6 4-1BB/CD3z Cloning:

[0285] pCDNA 3.1 V5 CAR-T E6 CD8/CD28/4-1BB/CD3z was digested with EcoRV and PmeI (New England Biolabs) to remove cytoplasmic domains. The vector without cytoplasmic domains was purified. CAR-T E6 CD8/4-1BB/CD3z gBLOCK was synthesized by our request by IDT, IA (SEq ID NO:302). Both, gBLOCK and the purified vector were ligated using the Gibson assembly cloning kit (New England Biolabs).

[0286] CAR C2 CD28/4-1BB/CD3z Cloning:

[0287] pCDNA 3.1 V5 CAR-T E6 CD8/CD28/4-1BB/CD3z was digested with KpnI and EcoRV (New England Biolabs) E6 scFV. The vector without E6 scFV was purified. CAR-T C2 gBLOCKs were synthesized by our request by IDT, IA (SEq ID NOS: 308-309). Both, gBLOCKs and the purified vector were ligated using the Gibson assembly cloning kit (New England Biolabs).

[0288] CAR Sub-Cloning into Lentiviral Vectors:

[0289] All pcDNA 3.1 V5 CAR cDNAs were amplified by polymerase chain reaction (PCR) using the following primers: 5-CGCGGCTAGCTTAAGCTTGGTACCGAGGGCCA-3′ (SEQ ID NO:640) and 5′-CGCGGCGGCCGCCTGATCAGCGGGTTTAAACTTATC-3′ (SEQ ID NO:641).

[0290] After digestion with NheI and NotI restriction enzymes (New England Biolabs), the purified fragments were cloned into lentiviral vectors (pCDH-EF1-MCS-IRES GFP and pCDH-CMV-MCS-EF1-copGFP+puro, SBI) digested with the same restriction enzymes.

[0291] CAR-E6-Fc/8/41BB/CD3z Cloning:

[0292] pCDH-CMV-MCS-EF1-copGFP+puro (SBI) was digested with NheI and NotI (New England Biolabs) and the vector was purified. gBLOCKs were synthesized by our request by IDT, IA (SEq ID NOS: 312, 313 and 314). The gBLOCKs and the purified vector were ligated using the Gibson assembly cloning kit (New England Biolabs).

[0293] CAR-E6-FcH/8/41BB/CD3z Cloning:

[0294] pCDH-CMV-MCS-EF1-copGFP+puro (SBI) was digested with NheI and NotI (New England Biolabs) and the vector was purified. gBLOCKs were synthesized by our request by IDT, IA (SEq ID NOS: 312, 317 and 314). The gBLOCKs and the purified vector were ligated using the Gibson assembly cloning kit (New England Biolabs).

[0295] CAR-E6-Fc-4-41BB-CD3z Cloning:

[0296] pCDH-CMV-MCS-EF1-copGFP+puro (SBI) was digested with NheI and NotI (New England Biolabs) and the vector was purified. gBLOCKs were synthesized by our request by IDT, IA (SEq ID NOS: 312, 313 and 320). The gBLOCKs and the purified vector were ligated using the Gibson assembly cloning kit (New England Biolabs).

[0297] CAR-E6 FcH/4/41BB/CD3z Cloning:

[0298] pCDH-CMV-MCS-EF1-copGFP+puro (SBI) was digested with NheI and NotI (New England Biolabs) and the vector was purified. gBLOCKs were synthesized by our request by IDT, IA (SEq ID NOS: 312, 317 and 320). The gBLOCKs and the purified vector were ligated using the Gibson assembly cloning kit (New England Biolabs).

[0299] CAR-E6 IgD/8/41BB/CD3z Cloning:

[0300] pCDH-CMV-MCS-EF1-copGFP+puro (SBI) was digested with NheI and NotI (New England Biolabs) and the vector was purified. gBLOCKs were synthesized by our request by IDT, IA (SEq ID NOS: 312, 325 and 326). The gBLOCKs and the purified vector were ligated using the Gibson assembly cloning kit (New England Biolabs).

[0301] CAR-E6 IgD/4/41BB/CD3z Cloning:

[0302] pCDH-CMV-MCS-EF1-copGFP+puro (SBI) was digested with NheI and NotI (New England Biolabs) and the vector was purified. gBLOCKs were synthesized by our request by IDT, IA (SEq ID NOS: 312, 329 and 326). The gBLOCKs and the purified vector were ligated using the Gibson assembly cloning kit (New England Biolabs).

[0303] CAR-E6 X4/8/41BB/CD3z Cloning:

[0304] pCDH-CMV-MCS-EF1-copGFP+puro (SBI) was digested with NheI and NotI (New England Biolabs) and the vector was purified. gBLOCKs were synthesized by our request by IDT, IA (SEq ID NOS: 312, 332 and 326). The gBLOCKs and the purified vector were ligated using the Gibson assembly cloning kit (New England Biolabs).

[0305] CAR-E6 X4/4/41BB/CD3z Cloning:

[0306] pCDH-CMV-MCS-EF1-copGFP+puro (SBI) was digested with NheI and NotI (New England Biolabs) and the vector was purified. gBLOCKs were synthesized by our request by IDT, IA (SEq ID NOS: 312, 335 and 326). The gBLOCKs and the purified vector were ligated using the Gibson assembly cloning kit (New England Biolabs).

[0307] CAR E6-8+4-4-41BB-CD3z Cloning:

[0308] pCDH-CMV-MCS-EF1-copGFP+puro (SBI) was digested with NheI and NotI (New England Biolabs) and the vector was purified. gBLOCKs were synthesized by our request by IDT, IA (SEq ID NOS: 312, 338 and 326). The gBLOCKs and the purified vector were ligated using the Gibson assembly cloning kit (New England Biolabs).

### Example 5—Lentivirus Production

[0309] HEK 293T cells (ATCC) were used to produce lentivirus. The day prior transfection plates (6 well plate) were coated with poly-D-lysine and cells seeded so that cell density reaches 90-95% at the time of transfection and cultures in a 5% CO2 atmosphere. The next daycells were transfected with Lipofectamine 3000 (life technologies) and Opti-MEM® I Reduced Serum Medium according to the manufacturer instructions(0.75 ug of lentiviral expression vecotr and 2.25 ug of pPACKH1 packaging mix was used). After 6 h incubation, the media was changed and media containing lentivirus was harvested after 24 and 48 hours. Lentivirus was concentrated with Lenti-X concentrator (Clontech) and titer was calculated using the Lenti-X p@4 Rapid Titer Kit (Clontech). Lentivirus was store at −80 C in single-use aliquots.

### Example 6—Lipofectamine Transient Expression

[0310] HEK 293T cells (ATCC) were used to test expression of humanized IgG. The night before transfection, cells were passed at 1/3 dilution (6 well plate) and cultures in a 5% CO2 atmosphere. The next day, 1 hour before transfection, the media was change to complete media without antibiotics (DMEM high glucose from ATCC containing 10% fetal calf serum). For transfection, we used Lipofectamine 3000 (life technologies) and Opti-MEM® I Reduced Serum Medium according to the manufacturer instructions. 1.25 ug of the heavy chain construct and 1.25 ug of the light chain construct or 2,5 ug of Fc-fusion constructs was used. After 48 h incubation, the media was collected, cleared by centrifugation and used in an ELISA assay to quantify the level of humanized IgG expression and binding to PSMGFR peptide.

### Example 7—Polyethylenimine (PEI) Large Scale Transient Expression

[0311] HEK 293T cells (ATCC) were used for large scale expression of Fc-fusion protein. The night before transfection, cells were passed (6.5×10⁶ cells in 150 mm dish) and cultures in a 5% CO2 atmosphere. The next day, 1 hour before transfection, cell were washed once with PBS pH 7.4 and the media was change to complete media without antibiotics (DMEM high glucose from ATCC containing 10% ultra low IgG fetal calf serum). For transfection, we used Polyethylenimine “Max” (PEI “Max”, Polysciences) and Opti-MEM® I Reduced Serum Medium (25 ug of Fc-fusion constructs+250 ug of PEI). After 72 h incubation, the media was collected and stored at −20° C. or cleared by centrifugation/filtration for purification.

### Example 8—Jurkat Cells Lentivirus Transduction

[0312] Protocol#1:

[0313] A 50/50 solution (2 mL) of lentivirus was prepared in fresh media, supplemented with 8 ug/mL of polybrene and added to a well of a 6 well plate. Jurkat E6-1 cells (ATCC, TIB-152) were pelleted at 1200 rpm for 5 min at RT and resuspended in fresh media (RPMI containing 10% fetal calf serum and 1% penicillin/streptomycin/amphotericin b). Cells were counted and add 2×10⁵ cells to the well containing the virus+Polybrene solution. Incubate for 24-48 h and add fresh media and/or split the cells. After 72 h, start growing cells with antibiotic selection (puromycin).

[0314] Protocol#2:

[0315] Jurkat E6-1 cells (ATCC, TIB-152) were pelleted at 1200 rpm for 5 min at RT and resuspended in fresh media (RPMI containing 10% fetal calf serum and 1% penicillin/streptomycin/amphotericin b) at 2.5×10⁵ cells/mL. Add 2 mL of cells to a 15 mL sterile conical tube, add 1× of Transdux infection reagent (1×, SBI) and lentivirus. Mix gently and incubate at RT for 20 min. Centrifuge cells at 1900 rpm for 30 min at 32° C., remove supernatant, resuspend cells in 2 mL of fresh media and transfer cells to a well of a 6 well plate. Inspect cells for GFP expression after 48 h.

### Example 9—T Cells Lentivirus Transduction

[0316] Highly purified T cells (AllCells) were pelleted at 200×g for 5 min at RT and resuspended at 1×10⁶ cells/mL in fresh media (RPMI1640 containing 10% fetal calf serum and 1% penicillin/streptomycin). Add CD3/CD28 activator Dynabeads (Thermo Fisher, 25 uL for 1×10⁶ cells) and seed 24 well plate with 1 mL of cells and add IL2 (Thermo Fisher). Monitor cells daily and split cells if needed. The day before the transduction coat a plate with Retronectin (Takara) and store it overnight at 4° C. The next, remove the Retronectin solution add add a blocking solution (2% BSA in PBS) and incubate 30 min at RT. Remove BSA solution add add PBS until cells are ready. Collect activated T cells and resuspend them at 0.5×10⁶ cells/mL in fresh media. Add 1 mL of cells to the retronectin treated plate, 1 mL of lentivirus solution and IL2. Cells were spinoculated by centrifugation of the pate at 1000×g for 90 min at RT. The plate was return to the incubator overnight. Next, remove 1 mL of media, add 1 mL of virus and repeat spinoculation. Monitor cells and split them if necessary at a density of 0.5-1×10⁶ cells/mL. T cells can be used for cytokine release assay or cytotoxicity assay 48 h post transduction.

### Example 10—IL2 Detection

[0317] IL-2 secretion in media was measured using a human IL-2 ELISA kit (Thermo Fisher). Plates were coated with and anti-IL-2 antibody (coating antibody, 1/100 in PBS). After overnight incubation at 4° C., the plate was wash 3 times with PBS-T and a 4% BSA solution was added to block remaining binding site on the well. After 1 h at RT the plate was washed once with PBS-T and conditioned media (CM) and IL-2 standard diluted in PBS+4% BSA, was added. After 2 h at RT the plate was washed 3× with PBS-T and anti-human IL-2 (detection antibody) diluted in PBS+4% BSA (1/100), was added. After 2 h at RT the plate was washed 5× with PBS-T and Streptavidin-HRP (1/400) was added. After 30 min at RT, the plate was washed 7× with PBS-T (soak 1 min each wash) and substrate solution was added. The reaction was stopped after 20 min by adding the stop solution and absorbance was read at 450 nm (minus absorbance at 550 nm) within 30 min of stopping.

### Example 11—IFN-γ Detection

[0318] IFN-γ secretion in media was measured using a human IFN-γ ELISA kit (Biolegend). Plates were coated with and anti-IFN-γ antibody (capture antibody, 1× in coating buffer). After overnight incubation at 4° C., the plate was washed 4 times with PBS-T and blocking solution was added to block remaining binding site on the well. After 1 h at RT (shaking at 500 rpm) the plate was washed 4 times with PBS-T and conditioned media (CM) and IFN-γ standard, was added. After 2 h at RT with shaking, the plate was washed 4 times with PBS-T and detection antibody (1×), was added. After 1 h at RT with shaking, the plate was washed 4 times with PBS-T and Avidin-HRP (1×) was added. After 30 min at RT with shaking, the plate was washed 5 times with PBS-T (soak 1 min each wash) and TMB substrate solution was added. The reaction was stopped after 20 min by adding the stop solution and absorbance was read at 450 nm (minus absorbance at 570 nm) within 15 min of stopping.

### Example 12—CAR T Cytotoxicity Assay

[0319] Human T cells were isolated from whole blood according to standard protocols. The T cells were then separately transduced twice with lenti virus bearing the CAR constructs, wherein the CAR constructs bear a GFP tag. Following 2-3 days of culture in RPMI 10% FBS and IL-2, the cells were stained with F(ab′)2 to label surface expression of MN-E6, MN-C2, MN-C3 and MN-C8. Cells were then sorted by flow cytometry for Fab-positive, GFP-positive cells. That means that the double positive population had a CAR inserted and that the CAR exposed the correct antibody fragment. The CAR T cells were then ready to be mixed with the MUC1* negative control cells or the target MUC1* positive cancer cells.

[0320] The target cells were prepared as follows: Harvest target cells and resuspend cells in serum-free medium containing 15 uM of CMTMr dye (Cell Tracker Orange, 5-and-6-4-chloromethyl benzoyl amino tetramethylrhodamine, Thermo Fisher) at 1-1.5×10⁶ cells/mL. Incubate 30 min under growth conditions appropriate to particular cell type. Wash in culture media and transfer stained cells to a new tube and incubate the cells 60 min in media. Wash 2 more times in culture media to get rid of all excess dye. Set up the assay in 24 well plates with 0.5 ml media total volume. Resuspend the target cells (and control target cells) so that there are always 20,000 cells per well (20,000 cells/250 ul). Plate 250 ul in each well. Add 250 ul of the T cells so that the ratio of T cell: target cells=20:1, 10:1, 5:1 or 1:1. Analyse cells after 24 h and 72 h. For suspension target cells, take off the 0.5 ml media from the well and place in tube, wash the well with 0.5 ml media or PBS. For adherent target cells, take off the 0.5 ml media from the well and place in tube, wash the well with 0.5 ml PBS. Add the PBS to the same tube and add 120 ul trypsin to the well. Incubate for 4 min then add 0.5 ml media to neutralize trypsin and place that in the tube as well. Spin cells and resuspend pellet in 100 ul FACS buffer. Spin cells again. Resuspend cells in 100 ul buffer+5 ul anti-CD3 antibody, for 30 min on ice (to stain T cells). After 30 min, wash stained cells 2× with FACS buffer and resuspend in 250 ul buffer. Run the cells through the filter cap of the FACS tube. 10 min prior to analysis, add 10 ul 7AAD dye to each tube and analyze with Fortessa under the Cytotoxicity template.

### Example 13—ELISA Expression Level of Humanized IgG

[0321] Goat Anti-human Fc specific antibody was diluted to 5 ug/mL in 0.1M carbonate/bicarbonate buffer pH 9.6 and 50 uL was added to each well of a 96 well plate. After overnight incubation at 4° C., the plate was wash twice with PBS-T and a 3% BSA solution was added to block remaining binding site on the well. After 1 h at RT the plate was washed twice with PBS-T and conditioned media (CM), diluted in PBS-T+1% BSA, was added at different concentrations. Also, purified human IgG (life technologies), diluted in PBS-T+1% BSA, was added at different concentrations to make a standard curve for determination of the expression level of the humanized IgG or Fc-fusion protein. After 1 h at RT the plate was washed 3× with PBS-T and anti-human (H+L) HRP (life technologies) diluted in PBS-T+1% BSA, was added at 1/2500. After 1 h at RT the plate was washed 3× with PBS-T and binding of human IgG and humanized IgG was measured at 415 nm using a ABTS solution (ThermoFisher) (FIG. 9 (MN-E6) and FIG. 11 (MN-C2)).

### Example 14—ELISA Humanized IgG Binding to PSMGFR Peptide of the MUC1* Extracellular Domain

[0322] A synthetic peptide of sequence PSMGFR was covalently coupled to BSA using Imject Maleimide activated BSA kit (Thermo Fisher). PSMGFR coupled BSA was diluted to 7.5 ug/mL in 0.1M carbonate/bicarbonate buffer pH 9.6 and 50 uL was added to each well of a 96 well plate. After overnight incubation at 4° C., the plate was wash twice with PBS-T and a 3% BSA solution was added to block remaining binding site on the well. After 1 h at RT the plate was washed twice with PBS-T and conditioned media (CM), diluted in PBS-T+1% BSA, was added at different concentrations. At the same time corresponding mouse IgG was diluted in PBS-T+1% BSA and added at different concentrations as binding control. After 1 h at RT the plate was washed 3× with PBS-T and anti-human (H+L) HRP (life technologies) diluted in PBS-T+1% BSA, was added at 1/5000 to detect binding of humanized IgG. Anti-Mouse HRP (life technologies) diluted in PBS-T+1% BSA, was added at 1/2500 to detect binding of mouse IgG. After 1 h at RT the plate was washed 3× with PBS-T and binding was measured at 415 nm using a ABTS solution (ThermoFisher) (FIG. 8 (MN-E6) and FIG. 10 (MN-C2)).

### Example 15—Stable Cell Lines Generation

[0323] CHO-K1 cells (ATCC) were used to create stable cell lines expressing high level of humanized IgG. HEK293 cells (ATCC) were used to create stable cell lines expressing high level of Fc-fusion proteins. The night before transfection, cells were passed at 1/3 dilution (6 well plate) and cultures in a 5% CO2 atmosphere. The next day, 1 hour before transfection, the media was change to complete media without antibiotics (F12K or DMEM containing 10% fetal calf serum). For transfection, we used Lipofectamine 3000 (life technologies) and Opti-MEM® I Reduced Serum Medium according to the manufacturer instructions. 1.25 ug of the heavy chain construct and 1.25 ug of the light chain construct or 2.5 ug of Fc-fusion constructs was used. After 24 h, cells were trypsinized and plated into a T75 flask (in F12K or DMEM containing 10% fetal calf serum). After 24 h, cells were trypsinized, diluted to 100 cells/mL and 1000 cells/mL in F12K or DMEM containing 10% FCS and selection agent (Zeocin for pSECTag2 or G418 for pCDNA 3.1 V5), plated in 96 well plate (100 uL per well) and cultures in a 5% CO2 atmosphere. After 2-3 weeks, the culture media from single clones were collected, cleared by centrifugation and used in an ELISA assay to quantify the level of humanized IgG expression and binding to PSMGFR peptide. The clones with the highest expression and PSMGFR binding were expanded for large scale expression.

### Example 16—scFV Expression

[0324] pET21b E6 scFV plasmid (with HisTag or StrepTagII) was transformed into Shuffle T7 express competent cells (NEB). TB broth (Terrific broth) was inoculated with 1/100 of an overnight culture (LB broth-30° C.-200 rpm) and cultured at 30° C./200 rpm. When OD600 reached ˜1, temperature was reduced to 20° C. and growth was continued. After 2 h, recombinant protein expression was induced with 0.2 mM Isopropyl-β-D-thio-galactoside (IPTG, Gold Biotechnology) and culture was stopped after 22 h. After harvesting the cells by centrifugation (6000 rpm for 10 min at 4° C.), cell pellet was resuspended with running buffer. For Histag protein buffer was: 50 mM Tris pH8.0, 300 mM NaCl and 5 mM imidazole. For StrepTagII protein buffer was 100 mM Tris pH 8.0 and 150 mM NaCl.

### Example 17—HisTag EscFV Purification

[0325] MgCl2 (0.5 mM), DNAse (0.5 ug/mL, Sigma), PMSF (1 mM, Gold Bitotechnology) and BugBuster (1×, Novagen) was added. Cell suspension was incubated on a rotating platform for 20 min at RT. Insoluble cell debris was removed by centrifugation (20000 rpm for 30 min at 4° c.). The cleared lysate was then applied to a Ni-NTA column (Qiagen) equilibrated with the running buffer. The column was washed before eluting the protein off the column with the running buffer supplemented with 495 mM imidazole. The protein was further purified by size exclusion chromatography (Superdex 200). The fractions containing the protein were pooled, aliquoted and stored at −80° C.

### Example 18—StrepTagII EscFV Purification

[0326] MgCl2 (0.5 mM), DNAse (0.5 ug/mL, Sigma), PMSF (1 mM, Gold Bitotechnology) and BugBuster (1×, Novagen) was added. Cell suspension was incubated on a rotating platform for 20 min at RT. Insoluble cell debris was removed by centrifugation (20000 rpm for 30 min at 4° c.). The cleared lysate was then applied to a Strep-Tactin column (IBA) equilibrated with the running buffer. The column was washed before eluting the protein off the column with the running buffer supplemented with 5 mM d-Desthiobiotin. The protein was further purified by size exclusion chromatography (Superdex 200). The fractions containing the protein were pooled, aliquoted and stored at −80° C.

### Example 19—Humanize IgG/Fc-Fusion Purification

[0327] Condition media (from transient transfection or stable cell line) was collected, cleared by centrifugation and filtered (0.2 um). The media was then loaded on a protein A (Genscript) or CaptureSelect FcXL (Thermo Fisher) and the protein purified according to manufacturer instructions using acid condition for elution. The eluted protein was then dialyzed against PBS pH 7.4 and further purified by size exclusion chromatography (Superdex 200). The fractions containing the protein were pooled, aliquoted and stored at −80° C.

### Example 20—Immunohistochemistry

[0328] Human tissue specimens were purchased from Biomax. The tissues were either normal or cancerous as determined by a board certified pathologist. Tissues were anonymized but were labeled with a number, tissue type, stage of cancer and if available, a TNM tumor grading designation. TNM grading is as follows: T is primary tumor. Tx is primary tumor cannot be assessed. T0 is no evidence of a tumor. This is carcinoma in situ, intraepithelial or invasion of lamina propia. T1 is tumor invades submucosa. T2 is tumor invades muscularis propia. T3 is tumor invades through muscularis propia into subserosa or into non-peritonealized pericolic or perirectal tissues. T4 is tumor directly invades other organs or structures and/or perforate visceral peritoneum. N is regional lymph nodes. NO is no regional lymph node metastasis. N1 is metastasis in 1 to 3 regional lymph nodes. N2 is metastatic in 4 or more regional lymph nodes. M is for distant metastasis. M0 means no distant metastasis. M1 is distant metastasis.

[0329] Tissues were stained with a primary anti-MUC1* antibody mouse monoclonal MN-C2, MN-E6, humanized MN-E6 scFv-Fc, or humanized MN-E6 scFv-Fc-biotin. If the primary were a mouse monoclonal antibody, then the secondary antibody used was a rabbit anti-mouse HRP-conjugated antibody. If the primary were a humanized antibody, then the secondary was a goat-anti-human HRP conjugated antibody antibody. If the primary were a biotinylated antibody, then the secondary was a streptavidin HRP conjugated antibody.

[0330] Tissue specimens were de-paraffinized using xylene and ethanol according to standard protocols. An antigen retrieval procedure was used for some tissues which involved 10 mM Sodium Citrate-0.05% Tween pH 6 buffer (pre boil buffer, keep warm) boil 10′, cool down 20′ in rice cooker, then rinse cold tap water 5 minutes then two 5 min. washes in TBS. Tissues were blocked for 1 hr at RT in 10% NGS plus 5% BSA in TBS. If the primary antibody used was humanized MN-E6scFv, which was conjugated to biotin so that it could be visualized by a secondary antibody, the tissues were pre-blocked with an avidin solution then a biotin solution. Primary antibodies were incubated with tissues overnight at 4 degrees C. in 1% BSA-TBS with gentle orbital rotation. Tissues were rinsed with TBS-T for 5 minutes with gentle rocking. For HRP-conjugate detection only, mounted tissues were incubated in 3% H₂O₂ in TBS for 15 minutes at RT. For tissues incubated with biotinylated primary antibodies, they were then bathed in StreptAvidin for 10 min with Streptavidin-HRP label (Biocare Cat#: HP604 G, H, L), then washed 3 times for 5 minutes at RT in TBS-T with gentle rocking. They were then developed with chromogen (DAB—1 mL diluent; 1 drop DAB substrate) for 5 minutes at RT, then rinsed with running tap water for 5 minutes. They were then counterstained for 1 second hematoxylin then brief dip in 0.08% NH4OH ‘bluing reagent’ followed by 5 minutes in running water. Tissues were then dehydrated and mounted with Cytoseal XYL (1 drop/section) and coverslipped.

[0331] All of the references cited herein are incorporated by reference in their entirety.

[0332] Those skilled in the art will recognize, or be able to ascertain using no more than routine experimentation, many equivalents to the specific embodiments of the invention specifically described herein.

The application's sequence listing, which the Patent Office published only in electronic form, follows.

SEQUENCE LISTING (641 sequences)

SEQ ID NO: 1 - protein, 1255 aa, Artificial Sequence
  MUC1 Receptor
MTPGTQSPFFLLLLLTVLTVVTGSGHASSTPGGEKETSATQRSSVPSSTEKNAVSMTSSVLSSHSPGSGSSTTQGQDVTLAPATEPASGSAATWGQDVTSVPVTRPALGSTTPPAHDVTSAPDNKPAPGSTAPPAHGVTSAPDTRPAPGSTAPPAHGVTSAPDTRPAPGSTAPPAHGVTSAPDTRPAPGSTAPPAHGVTSAPDTRPAPGSTAPPAHGVTSAPDTRPAPGSTAPPAHGVTSAPDTRPAPGSTAPPAHGVTSAPDTRPAPGSTAPPAHGVTSAPDTRPAPGSTAPPAHGVTSAPDTRPAPGSTAPPAHGVTSAPDTRPAPGSTAPPAHGVTSAPDTRPAPGSTAPPAHGVTSAPDTRPAPGSTAPPAHGVTSAPDTRPAPGSTAPPAHGVTSAPDTRPAPGSTAPPAHGVTSAPDTRPAPGSTAPPAHGVTSAPDTRPAPGSTAPPAHGVTSAPDTRPAPGSTAPPAHGVTSAPDTRPAPGSTAPPAHGVTSAPDTRPAPGSTAPPAHGVTSAPDTRPAPGSTAPPAHGVTSAPDTRPAPGSTAPPAHGVTSAPDTRPAPGSTAPPAHGVTSAPDTRPAPGSTAPPAHGVTSAPDTRPAPGSTAPPAHGVTSAPDTRPAPGSTAPPAHGVTSAPDTRPAPGSTAPPAHGVTSAPDTRPAPGSTAPPAHGVTSAPDTRPAPGSTAPPAHGVTSAPDTRPAPGSTAPPAHGVTSAPDTRPAPGSTAPPAHGVTSAPDTRPAPGSTAPPAHGVTSAPDTRPAPGSTAPPAHGVTSAPDTRPAPGSTAPPAHGVTSAPDTRPAPGSTAPPAHGVTSAPDTRPAPGSTAPPAHGVTSAPDTRPAPGSTAPPAHGVTSAPDTRPAPGSTAPPAHGVTSAPDTRPAPGSTAPPAHGVTSAPDTRPAPGSTAPPAHGVTSAPDTRPAPGSTAPPAHGVTSAPDNRPALGSTAPPVHNVTSASGSASGSASTLVHNGTSARATTTPASKSTPFSIPSHHSDTPTTLASHSTKTDASSTHHSSVPPLTSSNHSTSPQLSTGVSFFFLSFHISNLQFNSSLEDPSTDYYQELQRDISEMFLQIYKQGGFLGLSNIKFRPGSVVVQLTLAFREGTINVHDVETQFNQYKTEAASRYNLTISDVSVSDVPFPFSAQSGAGVPGWGIALLVLVCVLVALAIVYLIALAVCQCRRKNYGQLDIFPARDTYHPMSEYPTYHTHGRYVPPSSTDRSPYEKVSAGNGGSSLSYTNPAVAAASANL

SEQ ID NO: 2 - protein, 45 aa, Artificial Sequence
  PSMGFR
GTINVHDVETQFNQYKTEAASRYNLTISDVSVSDVPFPFSAQSGA

SEQ ID NO: 3 - DNA, 459 bp, Artificial Sequence
  Human NME1
atggccaactgtgagcgtaccttcattgcgatcaaaccagatggggtccagcggggtcttgtgggagagattatcaagcgttttgagcagaaaggattccgccttgttggtctgaaattcatgcaagcttccgaagatcttctcaaggaacactacgttgacctgaaggaccgtccattctttgccggcctggtgaaatacatgcactcagggccggtagttgccatggtctgggaggggctgaatgtggtgaagacgggccgagtcatgctcggggagaccaaccctgcagactccaagcctgggaccatccgtggagacttctgcatacaagttggcaggaacattatacatggcagtgattctgtggagagtgcagagaaggagatcggcttgtggtttcaccctgaggaactggtagattacacgagctgtgctcagaactggatctatgaatga

SEQ ID NO: 4 - protein, 152 aa, Artificial Sequence
  Human NME1
MANCERTFIAIKPDGVQRGLVGEIIKRFEQKGFRLVGLKFMQASEDLLKEHYVDLKDRPFFAGLVKYMHSGPVVAMVWEGLNVVKTGRVMLGETNPADSKPGTIRGDFCIQVGRNIIHGSDSVESAEKEIGLWFHPEELVDYTSCAQNWIYE

SEQ ID NO: 5 - DNA, 1131 bp, Artificial Sequence
  Human NME7
atgaatcatagtgaaagattcgttttcattgcagagtggtatgatccaaatgcttcacttcttcgacgttatgagcttttattttacccaggggatggatctgttgaaatgcatgatgtaaagaatcatcgcacctttttaaagcggaccaaatatgataacctgcacttggaagatttatttataggcaacaaagtgaatgtcttttctcgacaactggtattaattgactatggggatcaatatacagctcgccagctgggcagtaggaaagaaaaaacgctagccctaattaaaccagatgcaatatcaaaggctggagaaataattgaaataataaacaaagctggatttactataaccaaactcaaaatgatgatgctttcaaggaaagaagcattggattttcatgtagatcaccagtcaagaccctttttcaatgagctgatccagtttattacaactggtcctattattgccatggagattttaagagatgatgctatatgtgaatggaaaagactgctgggacctgcaaactctggagtggcacgcacagatgcttctgaaagcattagagccctctttggaacagatggcataagaaatgcagcgcatggccctgattcttttgcttctgcggccagagaaatggagttgttttttccttcaagtggaggttgtgggccggcaaacactgctaaatttactaattgtacctgttgcattgttaaaccccatgctgtcagtgaaggactgttgggaaagatcctgatggctatccgagatgcaggttttgaaatctcagctatgcagatgttcaatatggatcgggttaatgttgaggaattctatgaagtttataaaggagtagtgaccgaatatcatgacatggtgacagaaatgtattctggcccttgtgtagcaatggagattcaacagaataatgctacaaagacatttcgagaattttgtggacctgctgatcctgaaattgcccggcatttacgccctggaactctcagagcaatctttggtaaaactaagatccagaatgctgttcactgtactgatctgccagaggatggcctattagaggttcaatacttcttcaagatcttggataattag

SEQ ID NO: 6 - protein, 376 aa, Artificial Sequence
  Human NME7
MNHSERFVFIAEWYDPNASLLRRYELLFYPGDGSVEMHDVKNHRTFLKRTKYDNLHLEDLFIGNKVNVFSRQLVLIDYGDQYTARQLGSRKEKTLALIKPDAISKAGEIIEIINKAGFTITKLKMMMLSRKEALDFHVDHQSRPFFNELIQFITTGPIIAMEILRDDAICEWKRLLGPANSGVARTDASESIRALFGTDGIRNAAHGPDSFASAAREMELFFPSSGGCGPANTAKFTNCTCCIVKPHAVSEGLLGKILMAIRDAGFEISAMQMFNMDRVNVEEFYEVYKGVVTEYHDMVTEMYSGPCVAMEIQQNNATKTFREFCGPADPEIARHLRPGTLRAIFGKTKIQNAVHCTDLPEDGLLEVQYFFKILDN

SEQ ID NO: 7 - protein, 16 aa, Artificial Sequence
  NME7 peptide 1 (A domain)
MLSRKEALDFHVDHQS

SEQ ID NO: 8 - protein, 11 aa, Artificial Sequence
  NME7A peptide 2 (A domain)
SGVARTDASES

SEQ ID NO: 9 - protein, 20 aa, Artificial Sequence
  NME7B peptide 1 (B domain)
DAGFEISAMQMFNMDRVNVE

SEQ ID NO: 10 - protein, 16 aa, Artificial Sequence
  NME7B peptide 2 (B domain)
EVYKGVVTEYHDMVTE

SEQ ID NO: 11 - protein, 29 aa, Artificial Sequence
  NME7B peptide 3 (B domain)
AIFGKTKIQNAVHCTDLPEDGLLEVQYFF

SEQ ID NO: 12 - DNA, 366 bp, Artificial Sequence
  Mouse E6 Heavy chain variable region sequence
gaggtgaaggtggtggagtctgggggagacttagtgaagcctggagggtccctgaaactctcctgtgtagtctctggattcactttcagtagatatggcatgtcttgggttcgccagactccaggcaagaggctggagtgggtcgcaaccattagtggtggcggtacttacatctactatccagacagtgtgaaggggcgattcaccatctccagagacaatgccaagaacaccctgtacctgcaaatgagcagtctgaagtctgaggacacagccatgtatcactgtacaagggataactacggtaggaactacgactacggtatggactactggggtcaaggaacctcagtcaccgtctcctca

SEQ ID NO: 13 - protein, 122 aa, Artificial Sequence
  Mouse E6 Heavy chain variable region sequence
EVKVVESGGDLVKPGGSLKLSCVVSGFTFSRYGMSWVRQTPGKRLEWVATISGGGTYIYYPDSVKGRFTISRDNAKNTLYLQMSSLKSEDTAMYHCTRDNYGRNYDYGMDYWGQGTSVTVSS

SEQ ID NO: 14 - DNA, 75 bp, Artificial Sequence
  Mouse E6 heavy chain variable framework region 1 (FWR1) sequence
gaggtgaaggtggtggagtctgggggagacttagtgaagcctggagggtccctgaaactctcctgtgtagtctct

SEQ ID NO: 15 - protein, 30 aa, Artificial Sequence
  Mouse E6 heavy chain variable framework region 1 (FWR1) sequence
EVKVVESGGDLVKPGGSLKLSCVVSGFTFS

SEQ ID NO: 16 - DNA, 30 bp, Artificial Sequence
  Mouse E6 heavy chain variable complementarity determining regions 1 (CDR1) sequence
ggattcactttcagtagatatggcatgtct

SEQ ID NO: 17 - protein, 5 aa, Artificial Sequence
  Mouse E6 heavy chain variable complementarity determining regions 1 (CDR1) sequence
RYGMS

SEQ ID NO: 18 - DNA, 42 bp, Artificial Sequence
  Mouse E6 heavy chain variable framework region 2 (FWR2) sequence
tgggttcgccagactccaggcaagaggctggagtgggtcgca

SEQ ID NO: 19 - protein, 14 aa, Artificial Sequence
  Mouse E6 heavy chain variable framework region 2 (FWR2) sequence
WVRQTPGKRLEWVA

SEQ ID NO: 20 - DNA, 51 bp, Artificial Sequence
  Mouse E6 heavy chain variable complementarity determining regions 2 (CDR2) sequence
accattagtggtggcggtacttacatctactatccagacagtgtgaagggg

SEQ ID NO: 21 - protein, 17 aa, Artificial Sequence
  Mouse E6 heavy chain variable complementarity determining regions 2 (CDR2) sequence
TISGGGTYIYYPDSVKG

SEQ ID NO: 22 - DNA, 96 bp, Artificial Sequence
  Mouse E6 heavy chain variable framework region 3 (FWR3) acid sequence
cgattcaccatctccagagacaatgccaagaacaccctgtacctgcaaatgagcagtctgaagtctgaggacacagccatgtatcactgtacaagg

SEQ ID NO: 23 - protein, 32 aa, Artificial Sequence
  Mouse E6 heavy chain variable framework region 3 (FWR3) acid sequence
RFTISRDNAKNTLYLQMSSLKSEDTAMYHCTR

SEQ ID NO: 24 - DNA, 39 bp, Artificial Sequence
  Mouse E6 heavy chain variable complementarity determining regions 3 (CDR3) sequence
gataactacggtaggaactacgactacggtatggactac

SEQ ID NO: 25 - protein, 13 aa, Artificial Sequence
  Mouse E6 heavy chain variable complementarity determining regions 3 (CDR3) sequence
DNYGRNYDYGMDY

SEQ ID NO: 26 - DNA, 294 bp, Artificial Sequence
  IGHV3-21*03 heavy chain variable region sequence
gaggtgcagctggtggagtctgggggaggcctggtcaagcctggggggtccctgagactctcctgtgcagcctctggattcaccttcagtagctatagcatgaactgggtccgccaggctccagggaaggggctggagtgggtctcatccattagtagtagtagtagttacatatactacgcagactcagtgaagggccgattcaccatctccagagacaacgccaagaactcactgtatctgcaaatgaacagcctgagagccgaggacacggctgtgtattactgtgcgaga

SEQ ID NO: 27 - protein, 98 aa, Artificial Sequence
  IGHV3-21*03 heavy chain variable region sequence
EVQLVESGGGLVKPGGSLRLSCAASGFTFSSYSMNWVRQAPGKGLEWVSSISSSSSYIYYADSVKGRFTISRDNAKNSLYLQMNSLRAEDTAVYYCAR

SEQ ID NO: 28 - DNA, 90 bp, Artificial Sequence
  IGHV3-21*01 heavy chain variable framework region 1 (FWR1) sequence
gaggtgcagctggtggagtctgggggaggcctggtcaagcctggggggtccctgagactctcctgtgcagcctctggattcaccttcagt

SEQ ID NO: 29 - protein, 30 aa, Artificial Sequence
  IGHV3-21*01 heavy chain variable framework region 1 (FWR1) sequence
EVQLVESGGGLVKPGGSLRLSCAASGFTFS

SEQ ID NO: 30 - DNA, 15 bp, Artificial Sequence
  IGHV3-21*01 heavy chain variable complementarity determining regions 1 (CDR1) sequence
agctatagcatgaac

SEQ ID NO: 31 - protein, 5 aa, Artificial Sequence
  IGHV3-21*01 heavy chain variable complementarity determining regions 1 (CDR1) sequence
SYSMN

SEQ ID NO: 32 - DNA, 42 bp, Artificial Sequence
  IGHV3-21*01 heavy chain variable framework region 2 (FWR2) sequence
tgggtccgccaggctccagggaaggggctggagtgggtctca

SEQ ID NO: 33 - protein, 14 aa, Artificial Sequence
  IGHV3-21*01 heavy chain variable framework region 2 (FWR2) sequence
WVRQAPGKGLEWVS

SEQ ID NO: 34 - DNA, 51 bp, Artificial Sequence
  IGHV3-21*01 heavy chain variable complementarity determining regions 2 (CDR2) sequence
tccattagtagtagtagtagttacatatactacgcagactcagtgaagggc

SEQ ID NO: 35 - protein, 17 aa, Artificial Sequence
  IGHV3-21*01 heavy chain variable complementarity determining regions 2 (CDR2) sequence
SISSSSSYIYYADSVKG

SEQ ID NO: 36 - DNA, 96 bp, Artificial Sequence
  IGHV3-21*01 heavy chain variable framework region 3 (FWR3) sequence
cgattcaccatctccagagacaacgccaagaactcactgtatctgcaaatgaacagcctgagagccgaggacacggctgtgtattactgtgcgaga

SEQ ID NO: 37 - protein, 32 aa, Artificial Sequence
  IGHV3-21*01 heavy chain variable framework region 3 (FWR3) sequence
RFTISRDNAKNSLYLQMNSLRAEDTAVYYCAR

SEQ ID NO: 38 - DNA, 366 bp, Artificial Sequence
  Humanized E6 heavy chain variable region sequence
gaggtgcagctggtggagtctgggggaggcctggtcaagcctggggggtccctgagactctcctgtgcagcctctggattcaccttcagtaggtatggcatgagctgggtccgccaggctccagggaagaggctggagtgggtctcaaccattagtggcggaggcacctacatatactacccagactcagtgaagggccgattcaccatctccagagacaacgccaagaacaccctgtatctgcaaatgaacagcctgagagccgaggacacggctgtgtattactgtaccagagataactatggccgcaactatgattatggcatggattattggggccagggcaccctggtgaccgtgagcagc

SEQ ID NO: 39 - protein, 122 aa, Artificial Sequence
  Humanized E6 heavy chain variable region sequence
EVQLVESGGGLVKPGGSLRLSCAASGFTFSRYGMSWVRQAPGKRLEWVSTISGGGTYIYYPDSVKGRFTISRDNAKNTLYLQMNSLRAEDTAVYYCTRDNYGRNYDYGMDYWGQGTLVTVSS

SEQ ID NO: 40 - DNA, 90 bp, Artificial Sequence; identical to SEQ ID NO: 28
  Humanized E6 heavy chain variable framework region 1 (FWR1) acid sequence

SEQ ID NO: 41 - protein, 30 aa, Artificial Sequence; identical to SEQ ID NO: 29
  Humanized E6 heavy chain variable framework region 1 (FWR1) acid sequence

SEQ ID NO: 42 - DNA, 15 bp, Artificial Sequence
  Humanized E6 heavy chain variable complementarity determining regions 1 (CDR1) sequence
aggtatggcatgagc

SEQ ID NO: 43 - protein, 5 aa, Artificial Sequence
  Humanized E6 heavy chain variable complementarity determining regions 1 (CDR1) sequence
RYGMS

SEQ ID NO: 44 - DNA, 42 bp, Artificial Sequence
  Humanized E6 heavy chain variable framework region 2 (FWR2) acid sequence
tgggtccgccaggctccagggaagaggctggagtgggtctca

SEQ ID NO: 45 - protein, 14 aa, Artificial Sequence
  Humanized E6 heavy chain variable framework region 2 (FWR2) acid sequence
WVRQAPGKRLEWVS

SEQ ID NO: 46 - DNA, 51 bp, Artificial Sequence
  Humanized E6 heavy chain variable complementarity determining regions 2 (CDR2) sequence
accattagtggcggaggcacctacatatactacccagactcagtgaagggc

SEQ ID NO: 47 - protein, 17 aa, Artificial Sequence
  Humanized E6 heavy chain variable complementarity determining regions 2 (CDR2) sequence
TISGGGTYIYYPDSVKG

SEQ ID NO: 48 - DNA, 96 bp, Artificial Sequence
  Humanized E6 heavy chain variable framework region 3 (FWR3) acid sequence
cgattcaccatctccagagacaacgccaagaacaccctgtatctgcaaatgaacagcctgagagccgaggacacggctgtgtattactgtaccaga

SEQ ID NO: 49 - protein, 32 aa, Artificial Sequence
  Humanized E6 heavy chain variable framework region 3 (FWR3) acid sequence
RFTISRDNAKNTLYLQMNSLRAEDTAVYYCTR

SEQ ID NO: 50 - DNA, 39 bp, Artificial Sequence
  Humanized E6 heavy chain variable complementarity determining regions 3 (CDR3) sequence
gataactatggccgcaactatgattatggcatggattat

SEQ ID NO: 51 - protein, 13 aa, Artificial Sequence
  Humanized E6 heavy chain variable complementarity determining regions 3 (CDR3) sequence
DNYGRNYDYGMDY

SEQ ID NO: 52 - DNA, 1442 bp, Artificial Sequence
  Humanized E6 IgG2 heavy chain synthesized by Genescript
gaattctaagcttgggccaccatggaactggggctccgctgggttttccttgttgctattttagaaggtgtccagtgtgaggtgcagctggtggagtctgggggaggcctggtcaagcctggggggtccctgagactctcctgtgcagcctctggattcaccttcagtaggtatggcatgagctgggtccgccaggctccagggaagaggctggagtgggtctcaaccattagtggcggaggcacctacatatactacccagactcagtgaagggccgattcaccatctccagagacaacgccaagaacaccctgtatctgcaaatgaacagcctgagagccgaggacacggctgtgtattactgtaccagagataactatggccgcaactatgattatggcatggattattggggccagggcaccctggtgaccgtgagcagcgcctccaccaagggcccatcggtcttccccctggcgccctgctccaggagcacctccgagagcacagccgccctgggctgcctggtcaaggactacttccccgaaccggtgacggtgtcgtggaactcaggcgctctgaccagcggcgtgcacaccttcccagctgtcctacagtcctcaggactctactccctcagcagcgtggtgaccgtgccctccagcaacttcggcacccagacctacacctgcaacgtagatcacaagcccagcaacaccaaggtggacaagacagttgagcgcaaatgttgtgtcgagtgcccaccgtgcccagcaccacctgtggcaggaccgtcagtcttcctcttccccccaaaacccaaggacaccctcatgatctcccggacccctgaggtcacgtgcgtggtggtggacgtgagccacgaagaccccgaggtccagttcaactggtacgtggacggcgtggaggtgcataatgccaagacaaagccacgggaggagcagttcaacagcacgttccgtgtggtcagcgtcctcaccgttgtgcaccaggactggctgaacggcaaggagtacaagtgcaaggtctccaacaaaggcctcccagcccccatcgagaaaaccatctccaaaaccaaagggcagccccgagaaccacaggtgtacaccctgcccccatcccgggaggagatgaccaagaaccaggtcagcctgacctgcctggtcaaaggcttctaccccagcgacatcgccgtggagtgggagagcaatgggcagccggagaacaactacaagaccacacctcccatgctggactccgacggctccttcttcctctacagcaagctcaccgtggacaagagcaggtggcagcaggggaacgtcttctcatgctccgtgatgcatgaggctctgcacaaccactacacgcagaagagcctctccctgtctccgggtaaatagtaagtttaaactctaga

SEQ ID NO: 53 - protein, 477 aa, Artificial Sequence
  Humanized E6 IgG2 heavy chain synthesized by Genescript
  misc_feature (477)..(477): Xaa can be any naturally occurring amino acid
EFAWATMELGLRWVFLVAILEGVQCEVQLVESGGGLVKPGGSLRLSCAASGFTFSRYGMSWVRQAPGKRLEWVSTISGGGTYIYYPDSVKGRFTISRDNAKNTLYLQMNSLRAEDTAVYYCTRDNYGRNYDYGMDYWGQGTLVTVSSASTKGPSVFPLAPCSRSTSESTAALGCLVKDYFPEPVTVSWNSGALTSGVHTFPAVLQSSGLYSLSSVVTVPSSNFGTQTYTCNVDHKPSNTKVDKTVERKCCVECPPCPAPPVAGPSVFLFPPKPKDTLMISRTPEVTCVVVDVSHEDPEVQFNWYVDGVEVHNAKTKPREEQFNSTFRVVSVLTVVHQDWLNGKEYKCKVSNKGLPAPIEKTISKTKGQPREPQVYTLPPSREEMTKNQVSLTCLVKGFYPSDIAVEWESNGQPENNYKTTPPMLDSDGSFFLYSKLTVDKSRWQQGNVFSCSVMHEALHNHYTQKSLSLSPGKVTLX

SEQ ID NO: 54 - DNA, 981 bp, Artificial Sequence
  Human IgG2 heavy chain constant region sequence
gcctccaccaagggcccatcggtcttccccctggcgccctgctccaggagcacctccgagagcacagccgccctgggctgcctggtcaaggactacttccccgaaccggtgacggtgtcgtggaactcaggcgctctgaccagcggcgtgcacaccttcccagctgtcctacagtcctcaggactctactccctcagcagcgtggtgaccgtgccctccagcaacttcggcacccagacctacacctgcaacgtagatcacaagcccagcaacaccaaggtggacaagacagttgagcgcaaatgttgtgtcgagtgcccaccgtgcccagcaccacctgtggcaggaccgtcagtcttcctcttccccccaaaacccaaggacaccctcatgatctcccggacccctgaggtcacgtgcgtggtggtggacgtgagccacgaagaccccgaggtccagttcaactggtacgtggacggcgtggaggtgcataatgccaagacaaagccacgggaggagcagttcaacagcacgttccgtgtggtcagcgtcctcaccgttgtgcaccaggactggctgaacggcaaggagtacaagtgcaaggtctccaacaaaggcctcccagcccccatcgagaaaaccatctccaaaaccaaagggcagccccgagaaccacaggtgtacaccctgcccccatcccgggaggagatgaccaagaaccaggtcagcctgacctgcctggtcaaaggcttctaccccagcgacatcgccgtggagtgggagagcaatgggcagccggagaacaactacaagaccacacctcccatgctggactccgacggctccttcttcctctacagcaagctcaccgtggacaagagcaggtggcagcaggggaacgtcttctcatgctccgtgatgcatgaggctctgcacaaccactacacgcagaagagcctctccctgtctccgggtaaatag

SEQ ID NO: 55 - protein, 326 aa, Artificial Sequence
  Human IgG2 heavy chain constant region sequence
ASTKGPSVFPLAPCSRSTSESTAALGCLVKDYFPEPVTVSWNSGALTSGVHTFPAVLQSSGLYSLSSVVTVPSSNFGTQTYTCNVDHKPSNTKVDKTVERKCCVECPPCPAPPVAGPSVFLFPPKPKDTLMISRTPEVTCVVVDVSHEDPEVQFNWYVDGVEVHNAKTKPREEQFNSTFRVVSVLTVVHQDWLNGKEYKCKVSNKGLPAPIEKTISKTKGQPREPQVYTLPPSREEMTKNQVSLTCLVKGFYPSDIAVEWESNGQPENNYKTTPPMLDSDGSFFLYSKLTVDKSRWQQGNVFSCSVMHEALHNHYTQKSLSLSPGK

SEQ ID NO: 56 - DNA, 1362 bp, Artificial Sequence
  Humanized E6 IgG1 heavy chain sequence
gaggtgcagctggtggagtctgggggaggcctggtcaagcctggggggtccctgagactctcctgtgcagcctctggattcaccttcagtaggtatggcatgagctgggtccgccaggctccagggaagaggctggagtgggtctcaaccattagtggcggaggcacctacatatactacccagactcagtgaagggccgattcaccatctccagagacaacgccaagaacccactgtatctgcaaatgaacagcctgagagccgaggacacggctgtgtattactgtcccagagataactatggccgcaactatgattatggcatggattattggggccagggcaccctggtgaccgtgagcagcgctagcaccaagggcccatcggtcttccccctggcaccctcctccaagagcacctctgggggcacagcggccctgggctgcctggtcaaggactacttccccgaaccggtgacggtgtcgtggaactcaggcgccctgaccagcggcgtgcacaccttcccggctgtcctacagtcctcaggactctactccctcagcagcgtggtgacagtgccctccagcagcttgggcacccagacctacatctgcaacgtgaatcacaagcccagcaacaccaaggtggacaagaaagttgagcccaaatcttgtgacaaaactcacacatgcccaccgtgcccagcacctgaactcctggggggaccgtcagtcttcctcttccccccaaaacccaaggacaccctcatgatctcccggacccctgaggtcacatgcgtggtggtggacgtgagccacgaagaccctgaggtcaagttcaactggtacgtggacggcgtggaggtgcataatgccaagacaaagccgcgggaggagcagtacaacagcacgtaccgtgtggtcagcgtcctcaccgtcctgcaccaggactggctgaatggcaaggagtacaagtgcaaggtctccaacaaagccctcccagcccccatcgagaaaaccatctccaaagccaaagggcagccccgagaaccacaggtgtacaccctgcccccatcccgggaggagatgaccaagaaccaggtcagcctgacctgcctggtcaaaggcttctatcccagcgacatcgccgtggagtgggagagcaatgggcagccggagaacaactacaagaccacgcctcccgtgctggactccgacggctccttcttcctctacagcaagctcaccgtggacaagagcaggtggcagcaggggaacgtcttctcatgctccgtgatgcatgaggctctgcacaaccactacacgcagaagagcctctccctgtctccgggtaaatgataa

SEQ ID NO: 57 - protein, 452 aa, Artificial Sequence
  Humanized E6 IgG1 heavy chain sequence
EVQLVESGGGLVKPGGSLRLSCAASGFTFSRYGMSWVRQAPGKRLEWVSTISGGGTYIYYPDSVKGRFTISRDNAKNPLYLQMNSLRAEDTAVYYCPRDNYGRNYDYGMDYWGQGTLVTVSSASTKGPSVFPLAPSSKSTSGGTAALGCLVKDYFPEPVTVSWNSGALTSGVHTFPAVLQSSGLYSLSSVVTVPSSSLGTQTYICNVNHKPSNTKVDKKVEPKSCDKTHTCPPCPAPELLGGPSVFLFPPKPKDTLMISRTPEVTCVVVDVSHEDPEVKFNWYVDGVEVHNAKTKPREEQYNSTYRVVSVLTVLHQDWLNGKEYKCKVSNKALPAPIEKTISKAKGQPREPQVYTLPPSREEMTKNQVSLTCLVKGFYPSDIAVEWESNGQPENNYKTTPPVLDSDGSFFLYSKLTVDKSRWQQGNVFSCSVMHEALHNHYTQKSLSLSPGK

SEQ ID NO: 58 - DNA, 996 bp, Artificial Sequence
  Human IgG1 heavy chain constant region sequence
gctagcaccaagggcccatcggtcttccccctggcaccctcctccaagagcacctctgggggcacagcggccctgggctgcctggtcaaggactacttccccgaaccggtgacggtgtcgtggaactcaggcgccctgaccagcggcgtgcacaccttcccggctgtcctacagtcctcaggactctactccctcagcagcgtggtgacagtgccctccagcagcttgggcacccagacctacatctgcaacgtgaatcacaagcccagcaacaccaaggtggacaagaaagttgagcccaaatcttgtgacaaaactcacacatgcccaccgtgcccagcacctgaactcctggggggaccgtcagtcttcctcttccccccaaaacccaaggacaccctcatgatctcccggacccctgaggtcacatgcgtggtggtggacgtgagccacgaagaccctgaggtcaagttcaactggtacgtggacggcgtggaggtgcataatgccaagacaaagccgcgggaggagcagtacaacagcacgtaccgtgtggtcagcgtcctcaccgtcctgcaccaggactggctgaatggcaaggagtacaagtgcaaggtctccaacaaagccctcccagcccccatcgagaaaaccatctccaaagccaaagggcagccccgagaaccacaggtgtacaccctgcccccatcccgggaggagatgaccaagaaccaggtcagcctgacctgcctggtcaaaggcttctatcccagcgacatcgccgtggagtgggagagcaatgggcagccggagaacaactacaagaccacgcctcccgtgctggactccgacggctccttcttcctctacagcaagctcaccgtggacaagagcaggtggcagcaggggaacgtcttctcatgctccgtgatgcatgaggctctgcacaaccactacacgcagaagagcctctccctgtctccgggtaaatgataa

SEQ ID NO: 59 - protein, 330 aa, Artificial Sequence
  Human IgG1 heavy chain constant region sequence
ASTKGPSVFPLAPSSKSTSGGTAALGCLVKDYFPEPVTVSWNSGALTSGVHTFPAVLQSSGLYSLSSVVTVPSSSLGTQTYICNVNHKPSNTKVDKKVEPKSCDKTHTCPPCPAPELLGGPSVFLFPPKPKDTLMISRTPEVTCVVVDVSHEDPEVKFNWYVDGVEVHNAKTKPREEQYNSTYRVVSVLTVLHQDWLNGKEYKCKVSNKALPAPIEKTISKAKGQPREPQVYTLPPSREEMTKNQVSLTCLVKGFYPSDIAVEWESNGQPENNYKTTPPVLDSDGSFFLYSKLTVDKSRWQQGNVFSCSVMHEALHNHYTQKSLSLSPGK

SEQ ID NO: 60 - DNA, 560 bp, Artificial Sequence
  Human IgG1 heavy chain constant region gBLOCK#1 sequence
atggcatggattattggggccagggcaccctggtgaccgtgagcagcgctagcaccaagggcccatcggtcttccccctggcaccctcctccaagagcacctctgggggcacagcggccctgggctgcctggtcaaggactacttccccgaaccggtgacggtgtcgtggaactcaggcgccctgaccagcggcgtgcacaccttcccggctgtcctacagtcctcaggactctactccctcagcagcgtggtgacagtgccctccagcagcttgggcacccagacctacatctgcaacgtgaatcacaagcccagcaacaccaaggtggacaagaaagttgagcccaaatcttgtgacaaaactcacacatgcccaccgtgcccagcacctgaactcctggggggaccgtcagtcttcctcttccccccaaaacccaaggacaccctcatgatctcccggacccctgaggtcacatgcgtggtggtggacgtgagccacgaagaccctgaggtcaagttcaactggtacgtggacggcgtggaggtgcataatgccaag

SEQ ID NO: 61 - DNA, 557 bp, Artificial Sequence
  Human IgG1 heavy chain constant region gBLOCK#2 sequence
tacgtggacggcgtggaggtgcataatgccaagacaaagccgcgggaggagcagtacaacagcacgtaccgtgtggtcagcgtcctcaccgtcctgcaccaggactggctgaatggcaaggagtacaagtgcaaggtctccaacaaagccctcccagcccccatcgagaaaaccatctccaaagccaaagggcagccccgagaaccacaggtgtacaccctgcccccatcccgggaggagatgaccaagaaccaggtcagcctgacctgcctggtcaaaggcttctatcccagcgacatcgccgtggagtgggagagcaatgggcagccggagaacaactacaagaccacgcctcccgtgctggactccgacggctccttcttcctctacagcaagctcaccgtggacaagagcaggtggcagcaggggaacgtcttctcatgctccgtgatgcatgaggctctgcacaaccactacacgcagaagagcctctccctgtctccgggtaaatgataagtttaaacccgctgatcagcctcgactgtgccttctagttg

SEQ ID NO: 62 - DNA, 31 bp, Artificial Sequence
  E6 heavy chain variable region overlapping sequence
atggcatggattattggggccagggcaccct

SEQ ID NO: 63 - DNA, 33 bp, Artificial Sequence
  IgG1 heavy chain constant region overlapping region sequence
tacgtggacggcgtggaggtgcataatgccaag

SEQ ID NO: 64 - DNA, 33 bp, Artificial Sequence
  pCDNA3.1 V5 and pSECTag2 overlapping sequence
ccgctgatcagcctcgactgtgccttctagttg

SEQ ID NO: 65 - DNA, 318 bp, Artificial Sequence
  Mouse E6 Light Chain variable region sequence
caaattgttctcacccagtctccagcaatcatgtctgcatctccaggggaggaggtcaccctaacctgcagtgccacctcaagtgtaagttacatacactggttccagcagaggccaggcacttctcccaaactctggatttatagcacatccaacctggcttctggagtccctgttcgcttcagtggcagtggatatgggacctcttactctctcacaatcagccgaatggaggctgaagatgctgccacttattactgccagcaaaggagtagttccccattcacgttcggctcggggacaaagttggaaataaaa

SEQ ID NO: 66 - protein, 106 aa, Artificial Sequence
  Mouse E6 Light Chain variable region sequence
QIVLTQSPAIMSASPGEEVTLTCSATSSVSYIHWFQQRPGTSPKLWIYSTSNLASGVPVRFSGSGYGTSYSLTISRMEAEDAATYYCQQRSSSPFTFGSGTKLEIK

SEQ ID NO: 67 - DNA, 69 bp, Artificial Sequence
  Mouse E6 light chain variable framework region 1 (FWR1) sequence
caaattgttctcacccagtctccagcaatcatgtctgcatctccaggggaggaggtcaccctaacctgc

SEQ ID NO: 68 - protein, 23 aa, Artificial Sequence
  Mouse E6 light chain variable framework region 1 (FWR1) sequence
QIVLTQSPAIMSASPGEEVTLTC

SEQ ID NO: 69 - DNA, 30 bp, Artificial Sequence
  Mouse E6 light chain variable complementarity determining regions 1 (CDR1) sequence
agtgccacctcaagtgtaagttacatacac

SEQ ID NO: 70 - protein, 10 aa, Artificial Sequence
  Mouse E6 light chain variable complementarity determining regions 1 (CDR1) sequence
SATSSVSYIH

SEQ ID NO: 71 - DNA, 45 bp, Artificial Sequence
  Mouse E6 light chain variable framework region 2 (FWR2) sequence
tggttccagcagaggccaggcacttctcccaaactctggatttat

SEQ ID NO: 72 - protein, 15 aa, Artificial Sequence
  Mouse E6 light chain variable framework region 2 (FWR2) sequence
WFQQRPGTSPKLWIY

SEQ ID NO: 73 - DNA, 21 bp, Artificial Sequence
  Mouse E6 light chain variable complementarity determining regions 2 (CDR2) sequence
agcacatccaacctggcttct

SEQ ID NO: 74 - protein, 7 aa, Artificial Sequence
  Mouse E6 light chain variable complementarity determining regions 2 (CDR2) sequence
STSNLAS

SEQ ID NO: 75 - DNA, 96 bp, Artificial Sequence
  Mouse E6 light chain variable framework region 3 (FWR3) sequence
ggagtccctgttcgcttcagtggcagtggatatgggacctcttactctctcacaatcagccgaatggaggctgaagatgctgccacttattactgc

SEQ ID NO: 76 - protein, 32 aa, Artificial Sequence
  Mouse E6 light chain variable framework region 3 (FWR3) sequence
GVPVRFSGSGYGTSYSLTISRMEAEDAATYYC

SEQ ID NO: 77 - DNA, 27 bp, Artificial Sequence
  Mouse E6 light chain variable complementarity determining regions 3 (CDR3) sequence
cagcaaaggagtagttccccattcacg

SEQ ID NO: 78 - protein, 9 aa, Artificial Sequence
  Mouse E6 light chain variable complementarity determining regions 3 (CDR3) sequence
QQRSSSPFT

SEQ ID NO: 79 - DNA, 287 bp, Artificial Sequence
  IGKV3-11*02 light chain variable region sequence
gaaattgtgttgacacagtctccagccaccctgtctttgtctccaggggaaagagccaccctctcctgcagggccagtcagagtgttagcagctacttagcctggtaccaacagaaacctggccaggctcccaggctcctcatctatgatgcatccaacagggccactggcatcccagccaggttcagtggcagtgggtctgggagagacttcactctcaccatcagcagcctagagcctgaagattttgcagtttattactgtcagcagcgtagcaactggcctcc

SEQ ID NO: 80 - protein, 96 aa, Artificial Sequence
  IGKV3-11*02 light chain variable region sequence
EIVLTQSPATLSLSPGERATLSCRASQSVSSYLAWYQQKPGQAPRLLIYDASNRATGIPARFSGSGSGRDFTLTISSLEPEDFAVYYCQQRSNWPP

SEQ ID NO: 81 - DNA, 69 bp, Artificial Sequence
  IGKV3-11*02 light chain variable framework region 1 (FWR1) acid sequence
gaaattgtgttgacacagtctccagccaccctgtctttgtctccaggggaaagagccaccctctcctgc

SEQ ID NO: 82 - protein, 23 aa, Artificial Sequence
  IGKV3-11*02 light chain variable framework region 1 (FWR1) acid sequence
EIVLTQSPATLSLSPGERATLSC

SEQ ID NO: 83 - DNA, 33 bp, Artificial Sequence
  IGKV3-11*02 light chain variable complementarity determining regions 1 (CDR1) sequence
agggccagtcagagtgttagcagctacttagcc

SEQ ID NO: 84 - protein, 11 aa, Artificial Sequence
  IGKV3-11*02 light chain variable complementarity determining regions 1 (CDR1) sequence
RASQSVSSYLA

SEQ ID NO: 85 - DNA, 45 bp, Artificial Sequence
  IGKV3-11*02 light chain variable framework region 2 (FWR2) sequence
tggtaccaacagaaacctggccaggctcccaggctcctcatctat

SEQ ID NO: 86 - protein, 15 aa, Artificial Sequence
  IGKV3-11*02 light chain variable framework region 2 (FWR2) sequence
WYQQKPGQAPRLLIY

SEQ ID NO: 87 - DNA, 21 bp, Artificial Sequence
  IGKV3-11*02 light chain variable complementarity determining regions 2 (CDR2) sequence
gatgcatccaacagggccact

SEQ ID NO: 88 - protein, 7 aa, Artificial Sequence
  IGKV3-11*02 light chain variable complementarity determining regions 2 (CDR2) sequence
DASNRAT

SEQ ID NO: 89 - DNA, 96 bp, Artificial Sequence
  IGKV3-11*02 light chain variable framework region 3 (FWR3) sequence
ggcatcccagccaggttcagtggcagtgggtctgggagagacttcactctcaccatcagcagcctagagcctgaagattttgcagtttattactgt

SEQ ID NO: 90 - protein, 32 aa, Artificial Sequence
  IGKV3-11*02 light chain variable framework region 3 (FWR3) sequence
GIPARFSGSGSGTDFTLTISSLEPEDFAVYYC

SEQ ID NO: 91 - DNA, 23 bp, Artificial Sequence
  IGKV3-11*02 light chain variable complementarity determining regions3 (CDR3) sequence
cagcagcgtagcaactggcctcc

SEQ ID NO: 92 - protein, 8 aa, Artificial Sequence
  IGKV3-11*02 light chain variable complementarity determining regions3 (CDR3) sequence
QQRSNWPP

SEQ ID NO: 93 - DNA, 318 bp, Artificial Sequence
  Humanized E6 light chain variable region sequence
gaaattgtgttgacacagtctccagccaccctgtctttgtctccaggggaaagagccaccctcacctgcagcgccaccagcagtgttagctacatccactggtaccaacagaggcctggccagagccccaggctcctcatctatagcacctccaacctggccagcggcatcccagccaggttcagtggcagtgggtctgggagcgactacactctcaccatcagcagcctagagcctgaagattttgcagtttattactgtcagcagcgtagcagctcccctttcacctttggcagcggcaccaaagtggaaattaaa

SEQ ID NO: 94 - protein, 106 aa, Artificial Sequence
  Humanized E6 light chain variable region sequence
EIVLTQSPATLSLSPGERATLTCSATSSVSYIHWYQQRPGQSPRLLIYSTSNLASGIPARFSGSGSGSDYTLTISSLEPEDFAVYYCQQRSSSPFTFGSGTKVEIK

SEQ ID NO: 95 - DNA, 69 bp, Artificial Sequence
  Humanized E6 light chain variable framework region 1 (FWR1) acid sequence
gaaattgtgttgacacagtctccagccaccctgtctttgtctccaggggaaagagccaccctcacctgc

SEQ ID NO: 96 - protein, 23 aa, Artificial Sequence
  Humanized E6 light chain variable framework region 1 (FWR1) acid sequence
EIVLTQSPATLSLSPGERATLTC

SEQ ID NO: 97 - DNA, 30 bp, Artificial Sequence
  Humanized E6 light chain variable complementarity determining regions 1 (CDR1) sequence
agcgccaccagcagtgttagctacatccac

SEQ ID NO: 98 - protein, 10 aa, Artificial Sequence
  Humanized E6 light chain variable complementarity determining regions 1 (CDR1) sequence
SATSSVSYIH

SEQ ID NO: 99 - DNA, 45 bp, Artificial Sequence
  Humanized E6 heavy light variable framework region 2 (FWR2) acid sequence
tggtaccaacagaggcctggccagagccccaggctcctcatctat

SEQ ID NO: 100 - protein, 15 aa, Artificial Sequence
  Humanized E6 heavy light variable framework region 2 (FWR2) acid sequence
WYQQRPGQSPRLLIY

SEQ ID NO: 101 - DNA, 21 bp, Artificial Sequence
  Humanized E6 light chain variable complementarity determining regions 2 (CDR2) sequence
agcacctccaacctggccagc

SEQ ID NO: 102 - protein, 7 aa, Artificial Sequence
  Humanized E6 light chain variable complementarity determining regions 2 (CDR2) sequence
STSNLAS

SEQ ID NO: 103 - DNA, 96 bp, Artificial Sequence
  Humanized E6 light chain variable framework region 3 (FWR3) acid sequence
ggcatcccagccaggttcagtggcagtgggtctgggagcgactacactctcaccatcagcagcctagagcctgaagattttgcagtttattactgt

SEQ ID NO: 104 - protein, 32 aa, Artificial Sequence
  Humanized E6 light chain variable framework region 3 (FWR3) acid sequence
GIPARFSGSGSGSDYTLTISSLEPEDFAVYYC

SEQ ID NO: 105 - DNA, 27 bp, Artificial Sequence
  Humanized E6 light chain variable complementarity determining regions 3 (CDR3) sequence
cagcagcgtagcagctcccctttcacc

SEQ ID NO: 106 - protein, 9 aa, Artificial Sequence
  Humanized E6 light chain variable complementarity determining regions 3 (CDR3) sequence
QQRSSSPFT

SEQ ID NO: 107 - DNA, 740 bp, Artificial Sequence
  Humanized E6 Kappa light chain synthesized by Genescript
gaattctaagcttgggccaccatggaagccccagcgcagcttctcttcctcctgctactctggctcccagataccactggagaaattgtgttgacacagtctccagccaccctgtctttgtctccaggggaaagagccaccctcacctgcagcgccaccagcagtgttagctacatccactggtaccaacagaggcctggccagagccccaggctcctcatctatagcacctccaacctggccagcggcatcccagccaggttcagtggcagtgggtctgggagcgactacactctcaccatcagcagcctagagcctgaagattttgcagtttattactgtcagcagcgtagcagctcccctttcacctttggcagcggcaccaaagtggaaattaaaaggacggtggctgcaccatctgtcttcatcttcccgccatctgatgagcagttgaaatctggaactgcctctgttgtgtgcctgctgaataacttctatcccagagaggccaaagtacagtggaaggtggataacgccctccaatcgggtaactcccaggagagtgtcacagagcaggacagcaaggacagcacctacagcctcagcagcaccctgacgctgagcaaagcagactacgagaaacacaaagtctacgcctgcgaagtcacccatcagggcctgagctcgcccgtcacaaagagcttcaacaggggagagtgttagtaagtttaaactctaga

SEQ ID NO: 108 - protein, 243 aa, Artificial Sequence
  Humanized E6 Kappa light chain synthesized by Genescript
  misc_feature (243)..(243): Xaa can be any naturally occurring amino acid
EFAWATMEAPAQLLFLLLLWLPDTTGEIVLTQSPATLSLSPGERATLTCSATSSVSYIHWYQQRPGQSPRLLIYSTSNLASGIPARFSGSGSGSDYTLTISSLEPEDFAVYYCQQRSSSPFTFGSGTKVEIKRTVAAPSVFIFPPSDEQLKSGTASVVCLLNNFYPREAKVQWKVDNALQSGNSQESVTEQDSKDSTYSLSSTLTLSKADYEKHKVYACEVTHQGLSSPVTKSFNRGECVTLX

SEQ ID NO: 109 - DNA, 324 bp, Artificial Sequence
  Human Kappa light chain constant region sequence
aggacggtggctgcaccatctgtcttcatcttcccgccatctgatgagcagttgaaatctggaactgcctctgttgtgtgcctgctgaataacttctatcccagagaggccaaagtacagtggaaggtggataacgccctccaatcgggtaactcccaggagagtgtcacagagcaggacagcaaggacagcacctacagcctcagcagcaccctgacgctgagcaaagcagactacgagaaacacaaagtctacgcctgcgaagtcacccatcagggcctgagctcgcccgtcacaaagagcttcaacaggggagagtgttag

SEQ ID NO: 110 - protein, 107 aa, Artificial Sequence [sequence omitted]

SEQ ID NO: 111 - DNA, 642 bp, Artificial Sequence
  Humanized E6 lambda light chain sequence
gaaattgtgttgacacagtctccagccaccctgtctttgtctccaggggaaagagccaccctcacctgcagcgccaccagcagtgttagctacatccactggtaccaacagaggcctggccagagccccaggctcctcatctatagcacctccaacctggccagcggcatcccagccaggttcagtggcagtgggtctgggagcgactacactctcaccatcagcagcctagagcctgaagattttgcagtttattactgtcagcagcgtagcagctcccctttcacctttggcagcggcaccaaagtggaaattaaaggtcagcccaaggctgccccctcggtcactctgttcccgccctcctctgaggagcttcaagccaacaaggccacactggtgtgtctcataagtgacttctacccgggagccgtgacagtggcctggaaggcagatagcagccccgtcaaggcgggagtggagaccaccacaccctccaaacaaagcaacaacaagtacgcggccagcagctatctgagcctgacgcctgagcagtggaagtcccacagaagctacagctgccaggtcacgcatgaagggagcaccgtggagaagacagtggcccctacagaatgttcatagtaa

SEQ ID NO: 112 - protein, 212 aa, Artificial Sequence
  Humanized E6 lambda light chain sequence
EIVLTQSPATLSLSPGERATLTCSATSSVSYIHWYQQRPGQSPRLLIYSTSNLASGIPARFSGSGSGSDYTLTISSLEPEDFAVYYCQQRSSSPFTFGSGTKVEIKGQPKAAPSVTLFPPSSEELQANKATLVCLISDFYPGAVTVAWKADSSPVKAGVETTTPSKQSNNKYAASSYLSLTPEQWKSHRSYSCQVTHEGSTVEKTVAPTECS

SEQ ID NO: 113 - DNA, 324 bp, Artificial Sequence
  Humanized lambda light chain constant region sequence
ggtcagcccaaggctgccccctcggtcactctgttcccgccctcctctgaggagcttcaagccaacaaggccacactggtgtgtctcataagtgacttctacccgggagccgtgacagtggcctggaaggcagatagcagccccgtcaaggcgggagtggagaccaccacaccctccaaacaaagcaacaacaagtacgcggccagcagctatctgagcctgacgcctgagcagtggaagtcccacagaagctacagctgccaggtcacgcatgaagggagcaccgtggagaagacagtggcccctacagaatgttcatagtaa

SEQ ID NO: 114 - protein, 106 aa, Artificial Sequence
  Humanized lambda light chain constant region sequence
GQPKAAPSVTLFPPSSEELQANKATLVCLISDFYPGAVTVAWKADSSPVKAGVETTTPSKQSNNKYAASSYLSLTPEQWKSHRSYSCQVTHEGSTVEKTVAPTECS

SEQ ID NO: 115 - DNA, 614 bp, Artificial Sequence
  Human lambda light chain constant region gBLOCK#3 sequence
agcgccaccagcagtgttagctacatccactggtaccaacagaggcctggccagagccccaggctcctcatctatagcacctccaacctggccagcggcatcccagccaggttcagtggcagtgggtctgggagcgactacactctcaccatcagcagcctagagcctgaagattttgcagtttattactgtcagcagcgtagcagctcccctttcacctttggcagcggcaccaaagtggaaattaaaggtcagcccaaggctgccccctcggtcactctgttcccgccctcctctgaggagcttcaagccaacaaggccacactggtgtgtctcataagtgacttctacccgggagccgtgacagtggcctggaaggcagatagcagccccgtcaaggcgggagtggagaccaccacaccctccaaacaaagcaacaacaagtacgcggccagcagctatctgagcctgacgcctgagcagtggaagtcccacagaagctacagctgccaggtcacgcatgaagggagcaccgtggagaagacagtggcccctacagaatgttcatagtaagtttaaacccgctgatcagcctcgactgtgccttctagttg

SEQ ID NO: 116 - DNA, 31 bp, Artificial Sequence
  E6 light chain variable region overlapping sequence
agcgccaccagcagtgttagctacatccact

SEQ ID NO: 117 - DNA, 33 bp, Artificial Sequence; identical to SEQ ID NO: 64
  pCDNA3.1 V5 and pSECTag2 overlapping sequence

SEQ ID NO: 118 - DNA, 390 bp, Artificial Sequence
  Mouse C2 heavy chain variable region sequence
gaggtccagctggaggagtcagggggaggcttagtgaagcctggagggtccctgaaactctcctgtgcagcctctggattcactttcagtggctatgccatgtcttgggttcgccagactccggagaagaggctggagtgggtcgcaaccattagtagtggtggtacttatatctactatccagacagtgtgaaggggcgattcaccatctccagagacaatgccaagaacaccctgtacctgcaaatgagcagtctgaggtctgaggacacggccatgtattactgtgcaagacttgggggggataattactacgaatacttcgatgtctggggcgcagggaccacggtcaccgtctcctccgccaaaacgacacccccatctgtctat

SEQ ID NO: 119 - protein, 130 aa, Artificial Sequence
  Mouse C2 heavy chain variable region sequence
EVQLEESGGGLVKPGGSLKLSCAASGFTFSGYAMSWVRQTPEKRLEWVATISSGGTYIYYPDSVKGRFTISRDNAKNTLYLQMSSLRSEDTAMYYCARLGGDNYYEYFDVWGAGTTVTVSSAKTTPPSVY

SEQ ID NO: 120 - DNA, 90 bp, Artificial Sequence
  Mouse C2 heavy chain variable framework region 1 (FWR1) sequence
gaggtccagctggaggagtcagggggaggcttagtgaagcctggagggtccctgaaactctcctgtgcagcctctggattcactttcagt

SEQ ID NO: 121 - protein, 30 aa, Artificial Sequence
  Mouse C2 heavy chain variable framework region 1 (FWR1) sequence
EVQLEESGGGLVKPGGSLKLSCAASGFTFS

SEQ ID NO: 122 - DNA, 15 bp, Artificial Sequence
  Mouse C2 heavy chain variable complementarity determining regions 1 (CDR1) sequence
ggctatgccatgtct

SEQ ID NO: 123 - protein, 5 aa, Artificial Sequence
  Mouse C2 heavy chain variable complementarity determining regions 1 (CDR1) sequence
GYAMS

SEQ ID NO: 124 - DNA, 42 bp, Artificial Sequence
  Mouse C2 heavy chain variable framework region 2 (FWR2) sequence
tgggttcgccagactccggagaagaggctggagtgggtcgca

SEQ ID NO: 125 - protein, 14 aa, Artificial Sequence
  Mouse C2 heavy chain variable framework region 2 (FWR2) sequence
WVRQTPEKRLEWVA

SEQ ID NO: 126 - DNA, 51 bp, Artificial Sequence
  Mouse C2 heavy chain variable complementarity determining regions 2 (CDR2) sequence
accattagtagtggtggtacttatatctactatccagacagtgtgaagggg

SEQ ID NO: 127 - protein, 17 aa, Artificial Sequence
  Mouse C2 heavy chain variable complementarity determining regions 2 (CDR2) sequence
TISSGGTYIYYPDSVKG

SEQ ID NO: 128 - DNA, 96 bp, Artificial Sequence
  Mouse C2 heavy chain variable framework region 3 (FWR3) sequence
cgattcaccatctccagagacaatgccaagaacaccctgtacctgcaaatgagcagtctgaggtctgaggacacggccatgtattactgtgcaaga

SEQ ID NO: 129 - protein, 32 aa, Artificial Sequence
  Mouse C2 heavy chain variable framework region 3 (FWR3) sequence
RFTISRDNAKNTLYLQMSSLRSEDTAMYYCAR

SEQ ID NO: 130 - DNA, 36 bp, Artificial Sequence
  Mouse C2 heavy chain variable complementarity determining regions 3 (CDR3) sequence
cttgggggggataattactacgaatacttcgatgtc

SEQ ID NO: 131 - protein, 12 aa, Artificial Sequence
  Mouse C2 heavy chain variable complementarity determining regions 3 (CDR3) sequence
LGGDNYYEYFDV

SEQ ID NO: 132 - DNA, 294 bp, Artificial Sequence
  IGHV3-21*04 heavy chain variable region sequence
gaggtgcagctggtggagtctgggggaggcctggtcaagcctggggggtccctgagactctcctgtgcagcctctggattcaccttcagtagctatagcatgaactgggtccgccaggctccagggaaggggctggagtgggtctcatccattagtagtagtagtagttacatatactacgcagactcagtgaagggccgattcaccatctccagagacaacgccaagaactcactgtatctgcaaatgaacagcctgagagccgaggacacggccgtgtattactgtgcgaga

SEQ ID NO: 133 - protein, 98 aa, Artificial Sequence; identical to SEQ ID NO: 27
  IGHV3-21*04 heavy chain variable region sequence

SEQ ID NO: 134 - DNA, 90 bp, Artificial Sequence; identical to SEQ ID NO: 28
  IGHV3-21*04 heavy chain variable framework region 1 (FWR1) sequence

SEQ ID NO: 135 - protein, 30 aa, Artificial Sequence; identical to SEQ ID NO: 29
  IGHV3-21*04 heavy chain variable framework region 1 (FWR1) sequence

SEQ ID NO: 136 - DNA, 15 bp, Artificial Sequence
  IGHV3-21*04 heavy chain variable complementarity determining regions 1 (CDR1) sequence
agctatagcatgaac

SEQ ID NO: 137 - protein, 5 aa, Artificial Sequence
  IGHV3-21*04 heavy chain variable complementarity determining regions 1 (CDR1) sequence
SYSMN

SEQ ID NO: 138 - DNA, 41 bp, Artificial Sequence
  IGHV3-21*04 heavy chain variable framework region 2 (FWR2) sequence
gggtccgccaggctccagggaaggggctggagtgggtctca

SEQ ID NO: 139 - protein, 14 aa, Artificial Sequence
  IGHV3-21*04 heavy chain variable framework region 2 (FWR2) sequence
WVRQAPGKGLEWVS

SEQ ID NO: 140 - DNA, 51 bp, Artificial Sequence; identical to SEQ ID NO: 34
  IGHV3-21*04 heavy chain variable complementarity determining regions 2 (CDR2) sequence

SEQ ID NO: 141 - protein, 17 aa, Artificial Sequence
  IGHV3-21*04 heavy chain variable complementarity determining regions 2 (CDR2) sequence
SISSSSSYIYYADSVKG

SEQ ID NO: 142 - DNA, 96 bp, Artificial Sequence
  IGHV3-21*04 heavy chain variable framework region 3 (FWR3) sequence
cgattcaccatctccagagacaacgccaagaactcactgtatctgcaaatgaacagcctgagagccgaggacacggccgtgtattactgtgcgaga

SEQ ID NO: 143 - protein, 32 aa, Artificial Sequence; identical to SEQ ID NO: 37
  IGHV3-21*04 heavy chain variable framework region 3 (FWR3) sequence

SEQ ID NO: 144 - DNA, 363 bp, Artificial Sequence
  Humanized C2 heavy chain variable region sequence
gaggtgcagctggtggagtctgggggaggcctggtcaagcctggggggtccctgagactctcctgtgcagcctctggattcaccttcagtggctatgccatgagctgggtccgccaggctccagggaaggggctggagtgggtctcaaccattagtagtggcggaacctacatatactaccccgactcagtgaagggccgattcaccatctccagagacaacgccaagaactcactgtatctgcaaatgaacagcctgagagccgaggacacggccgtgtattactgtgcgagacttgggggggataattactacgaatacttcgatgtctggggcaaagggaccacggtcaccgtctcctcc

SEQ ID NO: 145 - protein, 121 aa, Artificial Sequence
  Humanized C2 heavy chain variable region sequence
EVQLVESGGGLVKPGGSLRLSCAASGFTFSGYAMSWVRQAPGKGLEWVSTISSGGTYIYYPDSVKGRFTISRDNAKNSLYLQMNSLRAEDTAVYYCARLGGDNYYEYFDVWGKGTTVTVSS

SEQ ID NO: 146 - DNA, 90 bp, Artificial Sequence; identical to SEQ ID NO: 28
  Humanized C2 heavy chain variable framework region 1 (FWR1) sequence

SEQ ID NO: 147 - protein, 30 aa, Artificial Sequence; identical to SEQ ID NO: 29
  Humanized C2 heavy chain variable framework region 1 (FWR1) sequence

SEQ ID NO: 148 - DNA, 15 bp, Artificial Sequence
  Humanized C2 heavy chain variable complementarity determining regions 1 (CDR1) sequence
ggctatgccatgagc

SEQ ID NO: 149 - protein, 5 aa, Artificial Sequence
  Humanized C2 heavy chain variable complementarity determining regions 1 (CDR1) sequence
GYAMS

SEQ ID NO: 150 - DNA, 43 bp, Artificial Sequence
  Humanized C2 heavy chain variable framework region 2 (FWR2) sequence
tgggtccgccaggctccagggaaggggctggagtgggtctcaa

SEQ ID NO: 151 - protein, 14 aa, Artificial Sequence
  Humanized C2 heavy chain variable framework region 2 (FWR2) sequence
WVRQAPGKGLEWVS

SEQ ID NO: 152 - DNA, 51 bp, Artificial Sequence
  Humanized C2 heavy chain variable complementarity determining regions 2 (CDR2) sequence
accattagtagtggcggaacctacatatactaccccgactcagtgaagggc

SEQ ID NO: 153 - protein, 17 aa, Artificial Sequence
  Humanized C2 heavy chain variable complementarity determining regions 2 (CDR2) sequence
TISSGGTYIYYPDSVKG

SEQ ID NO: 154 - DNA, 96 bp, Artificial Sequence; identical to SEQ ID NO: 142
  Humanized C2 heavy chain variable framework region 3 (FWR3) sequence

SEQ ID NO: 155 - protein, 32 aa, Artificial Sequence; identical to SEQ ID NO: 37
  Humanized C2 heavy chain variable framework region 3 (FWR3) sequence

SEQ ID NO: 156 - DNA, 36 bp, Artificial Sequence; identical to SEQ ID NO: 130
  Humanized C2 heavy chain variable complementarity determining regions 3 (CDR3) sequence

SEQ ID NO: 157 - protein, 12 aa, Artificial Sequence
  Humanized C2 heavy chain variable complementarity determining regions 3 (CDR3) sequence
LGGDNYYEYFDV

SEQ ID NO: 158 - DNA, 1359 bp, Artificial Sequence
  Humanized C2 IgG1 heavy chain sequence
gaggtgcagctggtggagtctgggggaggcctggtcaagcctggggggtccctgagactctcctgtgcagcctctggattcaccttcagtggctatgccatgagctgggtccgccaggctccagggaaggggctggagtgggtctcaaccattagtagtggcggaacctacatatactaccccgactcagtgaagggccgattcaccatctccagagacaacgccaagaactcactgtatctgcaaatgaacagcctgagagccgaggacacggccgtgtattactgtgcgagacttgggggggataattactacgaatacttcgatgtctggggcaaagggaccacggtcaccgtctcctccgctagcaccaagggcccatcggtcttccccctggcaccctcctccaagagcacctctgggggcacagcggccctgggctgcctggtcaaggactacttccccgaaccggtgacggtgtcgtggaactcaggcgccctgaccagcggcgtgcacaccttcccggctgtcctacagtcctcaggactctactccctcagcagcgtggtgacagtgccctccagcagcttgggcacccagacctacatctgcaacgtgaatcacaagcccagcaacaccaaggtggacaagaaagttgagcccaaatcttgtgacaaaactcacacatgcccaccgtgcccagcacctgaactcctggggggaccgtcagtcttcctcttccccccaaaacccaaggacaccctcatgatctcccggacccctgaggtcacatgcgtggtggtggacgtgagccacgaagaccctgaggtcaagttcaactggtacgtggacggcgtggaggtgcataatgccaagacaaagccgcgggaggagcagtacaacagcacgtaccgtgtggtcagcgtcctcaccgtcctgcaccaggactggctgaatggcaaggagtacaagtgcaaggtctccaacaaagccctcccagcccccatcgagaaaaccatctccaaagccaaagggcagccccgagaaccacaggtgtacaccctgcccccatcccgggaggagatgaccaagaaccaggtcagcctgacctgcctggtcaaaggcttctatcccagcgacatcgccgtggagtgggagagcaatgggcagccggagaacaactacaagaccacgcctcccgtgctggactccgacggctccttcttcctctacagcaagctcaccgtggacaagagcaggtggcagcaggggaacgtcttctcatgctccgtgatgcatgaggctctgcacaaccactacacgcagaagagcctctccctgtctccgggtaaatgataa

SEQ ID NO: 159 - protein, 451 aa, Artificial Sequence
  Humanized C2 IgG1 heavy chain sequence
EVQLVESGGGLVKPGGSLRLSCAASGFTFSGYAMSWVRQAPGKGLEWVSTISSGGTYIYYPDSVKGRFTISRDNAKNSLYLQMNSLRAEDTAVYYCARLGGDNYYEYFDVWGKGTTVTVSSASTKGPSVFPLAPSSKSTSGGTAALGCLVKDYFPEPVTVSWNSGALTSGVHTFPAVLQSSGLYSLSSVVTVPSSSLGTQTYICNVNHKPSNTKVDKKVEPKSCDKTHTCPPCPAPELLGGPSVFLFPPKPKDTLMISRTPEVTCVVVDVSHEDPEVKFNWYVDGVEVHNAKTKPREEQYNSTYRVVSVLTVLHQDWLNGKEYKCKVSNKALPAPIEKTISKAKGQPREPQVYTLPPSREEMTKNQVSLTCLVKGFYPSDIAVEWESNGQPENNYKTTPPVLDSDGSFFLYSKLTVDKSRWQQGNVFSCSVMHEALHNHYTQKSLSLSPGK

SEQ ID NO: 160 - DNA, 616 bp, Artificial Sequence
  Humanized C2 gBLOCK#4 sequence
actcactatagggagacccaagctggctagttaagcttgggccaccatggagacagacacactcctgctatgggtactgctgctctgggttccaggttccactggtgacgaggtgcagctggtggagtctgggggaggcctggtcaagcctggggggtccctgagactctcctgtgcagcctctggattcaccttcagtggctatgccatgagctgggtccgccaggctccagggaaggggctggagtgggtctcaaccattagtagtggcggaacctacatatactaccccgactcagtgaagggccgattcaccatctccagagacaacgccaagaactcactgtatctgcaaatgaacagcctgagagccgaggacacggccgtgtattactgtgcgagacttgggggggataattactacgaatacttcgatgtctggggcaaagggaccacggtcaccgtctcctccgctagcaccaagggcccatcggtcttccccctggcaccctcctccaagagcacctctgggggcacagcggccctgggctgcctggtcaaggactacttccccgaaccggtgacggtgtcgtggaactcaggcgccctgaccagc

SEQ ID NO: 161 - DNA, 32 bp, Artificial Sequence
  pCDNA3.1 V5 overlapping sequence
actcactatagggagacccaagctggctagtt

SEQ ID NO: 162 - DNA, 34 bp, Artificial Sequence
  Human IgG1 constant region overlapping sequence
gacggtgtcgtggaactcaggcgccctgaccagc

SEQ ID NO: 163 - DNA, 1347 bp, Artificial Sequence
  Humanized C2 IgG2 heavy chain sequence
gaggtgcagctggtggagtctgggggaggcctggtcaagcctggggggtccctgagactctcctgtgcagcctctggattcaccttcagtggctatgccatgagctgggtccgccaggctccagggaaggggctggagtgggtctcaaccattagtagtggcggaacctacatatactaccccgactcagtgaagggccgattcaccatctccagagacaacgccaagaactcactgtatctgcaaatgaacagcctgagagccgaggacacggccgtgtattactgtgcgagacttgggggggataattactacgaatacttcgatgtctggggcaaagggaccacggtcaccgtctcctccgcctccaccaagggcccatcggtcttccccctggcgccctgctccaggagcacctccgagagcacagccgccctgggctgcctggtcaaggactacttccccgaaccggtgacggtgtcgtggaactcaggcgctctgaccagcggcgtgcacaccttcccagctgtcctacagtcctcaggactctactccctcagcagcgtggtgaccgtgccctccagcaacttcggcacccagacctacacctgcaacgtagatcacaagcccagcaacaccaaggtggacaagacagttgagcgcaaatgttgtgtcgagtgcccaccgtgcccagcaccacctgtggcaggaccgtcagtcttcctcttccccccaaaacccaaggacaccctcatgatctcccggacccctgaggtcacgtgcgtggtggtggacgtgagccacgaagaccccgaggtccagttcaactggtacgtggacggcgtggaggtgcataatgccaagacaaagccacgggaggagcagttcaacagcacgttccgtgtggtcagcgtcctcaccgttgtgcaccaggactggctgaacggcaaggagtacaagtgcaaggtctccaacaaaggcctcccagcccccatcgagaaaaccatctccaaaaccaaagggcagccccgagaaccacaggtgtacaccctgcccccatcccgggaggagatgaccaagaaccaggtcagcctgacctgcctggtcaaaggcttctaccccagcgacatcgccgtggagtgggagagcaatgggcagccggagaacaactacaagaccacacctcccatgctggactccgacggctccttcttcctctacagcaagctcaccgtggacaagagcaggtggcagcaggggaacgtcttctcatgctccgtgatgcatgaggctctgcacaaccactacacgcagaagagcctctccctgtctccgggtaaatagtaa

SEQ ID NO: 164 - protein, 447 aa, Artificial Sequence
  Humanized C2 IgG2 heavy chain sequence
EVQLVESGGGLVKPGGSLRLSCAASGFTFSGYAMSWVRQAPGKGLEWVSTISSGGTYIYYPDSVKGRFTISRDNAKNSLYLQMNSLRAEDTAVYYCARLGGDNYYEYFDVWGKGTTVTVSSASTKGPSVFPLAPCSRSTSESTAALGCLVKDYFPEPVTVSWNSGALTSGVHTFPAVLQSSGLYSLSSVVTVPSSNFGTQTYTCNVDHKPSNTKVDKTVERKCCVECPPCPAPPVAGPSVFLFPPKPKDTLMISRTPEVTCVVVDVSHEDPEVQFNWYVDGVEVHNAKTKPREEQFNSTFRVVSVLTVVHQDWLNGKEYKCKVSNKGLPAPIEKTISKTKGQPREPQVYTLPPSREEMTKNQVSLTCLVKGFYPSDIAVEWESNGQPENNYKTTPPMLDSDGSFFLYSKLTVDKSRWQQGNVFSCSVMHEALHNHYTQKSLSLSPGK

SEQ ID NO: 165 - DNA, 549 bp, Artificial Sequence
  Humanized C2 gBLOCK#5 sequence
tgctctgggttccaggttccactggtgacgcggcccagccggccgaggtgcagctggtggagtctgggggaggcctggtcaagcctggggggtccctgagactctcctgtgcagcctctggattcaccttcagtggctatgccatgagctgggtccgccaggctccagggaaggggctggagtgggtctcaaccattagtagtggcggaacctacatatactaccccgactcagtgaagggccgattcaccatctccagagacaacgccaagaactcactgtatctgcaaatgaacagcctgagagccgaggacacggccgtgtattactgtgcgagacttgggggggataattactacgaatacttcgatgtctggggcaaagggaccacggtcaccgtctcctccgcctccaccaagggcccatcggtcttccccctggcgccctgctccaggagcacctccgagagcacagccgccctgggctgcctggtcaaggactacttccccgaaccggtgacggtgtcgtggaactcaggcgctctgacca

SEQ ID NO: 166 - DNA, 31 bp, Artificial Sequence
  pSEC Tag2 overlapping sequence
tgctctgggttccaggttccactggtgacgc

SEQ ID NO: 167 - DNA, 32 bp, Artificial Sequence
  Human IgG2 constant region overlapping sequence
gacggtgtcgtggaactcaggcgctctgacca

SEQ ID NO: 168 - DNA, 360 bp, Artificial Sequence
  Mouse C2 light chain variable region sequence
gacattgtgatcacacagtctacagcttccttaggtgtatctctggggcagagggccaccatctcatgcagggccagcaaaagtgtcagtacatctggctatagttatatgcactggtaccaacagagaccaggacagccacccaaactcctcatctatcttgcatccaacctagaatctggggtccctgccaggttcagtggcagtgggtctgggacagacttcaccctcaacatccatcctgtggaggaggaggatgctgcaacctattactgtcagcacagtagggagcttccgttcacgttcggaggggggaccaagctggagataaaacgggctgatgctgcaccaactgtatcc

SEQ ID NO: 169 - protein, 120 aa, Artificial Sequence
  Mouse C2 light chain variable region sequence
DIVITQSTASLGVSLGQRATISCRASKSVSTSGYSYMHWYQQRPGQPPKLLIYLASNLESGVPARFSGSGSGTDFTLNIHPVEEEDAATYYCQHSRELPFTFGGGTKLEIKRADAAPTVS

SEQ ID NO: 170 - DNA, 69 bp, Artificial Sequence
  Mouse C2 light chain variable framework region 1 (FWR1) sequence
gacattgtgatcacacagtctacagcttccttaggtgtatctctggggcagagggccaccatctcatgc

SEQ ID NO: 171 - protein, 23 aa, Artificial Sequence
  Mouse C2 light chain variable framework region 1 (FWR1) sequence
DIVITQSTASLGVSLGQRATISC

SEQ ID NO: 172 - DNA, 45 bp, Artificial Sequence
  Mouse C2 light chain variable complementarity determining regions 1 (CDR1) sequence
agggccagcaaaagtgtcagtacatctggctatagttatatgcac

SEQ ID NO: 173 - protein, 15 aa, Artificial Sequence
  Mouse C2 light chain variable complementarity determining regions 1 (CDR1) sequence
RASKSVSTSGYSYMH

SEQ ID NO: 174 - DNA, 45 bp, Artificial Sequence
  Mouse C2 light chain variable framework region 2 (FWR2) sequence
tggtaccaacagagaccaggacagccacccaaactcctcatctat

SEQ ID NO: 175 - protein, 15 aa, Artificial Sequence
  Mouse C2 light chain variable framework region 2 (FWR2) sequence
WYQQRPGQPPKLLIY

SEQ ID NO: 176 - DNA, 20 bp, Artificial Sequence
  Mouse C2 light chain variable complementarity determining regions 2 (CDR2) sequence
cttgcatccaacctagaatc

SEQ ID NO: 177 - protein, 7 aa, Artificial Sequence
  Mouse C2 light chain variable complementarity determining regions 2 (CDR2) sequence
LASNLES

SEQ ID NO: 178 - DNA, 97 bp, Artificial Sequence
  Mouse C2 light chain variable framework region 3 (FWR3) sequence
tggggtccctgccaggttcagtggcagtgggtctgggacagacttcaccctcaacatccatcctgtggaggaggaggatgctgcaacctattactgt

SEQ ID NO: 179 - protein, 32 aa, Artificial Sequence
  Mouse C2 light chain variable framework region 3 (FWR3) sequence
GVPARFSGSGSGTDFTLNIHPVEEEDAATYYC

SEQ ID NO: 180 - DNA, 27 bp, Artificial Sequence
  Mouse C2 light chain variable complementarity determining regions 3 (CDR3) sequence
cagcacagtagggagcttccgttcacg

SEQ ID NO: 181 - protein, 9 aa, Artificial Sequence
  Mouse C2 light chain variable complementarity determining regions 3 (CDR3) sequence
QHSRELPFT

SEQ ID NO: 182 - DNA, 303 bp, Artificial Sequence
  IGKV7-3*01 light chain variable region sequence
gacattgtgctgacccagtctccagcctccttggccgtgtctccaggacagagggccaccatcacctgcagagccagtgagagtgtcagtttcttgggaataaacttaattcactggtatcagcagaaaccaggacaacctcctaaactcctgatttaccaagcatccaataaagacactggggtcccagccaggttcagcggcagtgggtctgggaccgatttcaccctcacaattaatcctgtggaagctaatgatactgcaaattattactgtctgcagagtaagaattttcctcccaca

SEQ ID NO: 183 - protein, 101 aa, Artificial Sequence
  IGKV7-3*01 light chain variable region sequence
DIVLTQSPASLAVSPGQRATITCRASESVSFLGINLIHWYQQKPGQPPKLLIYQASNKDTGVPARFSGSGSGTDFTLTINPVEANDTANYYCLQSKNFPPT

SEQ ID NO: 184 - DNA, 69 bp, Artificial Sequence
  IGKV7-3*01 light chain variable framework region 1 (FWR1) sequence
gacattgtgctgacccagtctccagcctccttggccgtgtctccaggacagagggccaccatcacctgc

SEQ ID NO: 185 - protein, 23 aa, Artificial Sequence
  IGKV7-3*01 light chain variable framework region 1 (FWR1) sequence
DIVLTQSPASLAVSPGQRATITC

SEQ ID NO: 186 - DNA, 45 bp, Artificial Sequence
  IGKV7-3*01 light chain variable complementarity determining regions 1 (CDR1) sequence
agagccagtgagagtgtcagtttcttgggaataaacttaattcac

SEQ ID NO: 187 - protein, 15 aa, Artificial Sequence
  IGKV7-3*01 light chain variable complementarity determining regions 1 (CDR1) sequence
RASESVSFLGINLIH

SEQ ID NO: 188 - DNA, 45 bp, Artificial Sequence
  IGKV7-3*01 light chain variable framework region 2 (FWR2) sequence
tggtatcagcagaaaccaggacaacctcctaaactcctgatttac

SEQ ID NO: 189 - protein, 15 aa, Artificial Sequence
  IGKV7-3*01 light chain variable framework region 2 (FWR2) sequence
WYQQKPGQPPKLLIY

SEQ ID NO: 190 - DNA, 21 bp, Artificial Sequence
  IGKV7-3*01 light chain variable complementarity determining regions 2 (CDR2) sequence
caagcatccaataaagacact

SEQ ID NO: 191 - protein, 7 aa, Artificial Sequence
  IGKV7-3*01 light chain variable complementarity determining regions 2 (CDR2) sequence
QASNKDT

SEQ ID NO: 192 - DNA, 96 bp, Artificial Sequence
  IGKV7-3*01 light chain variable framework region 3 (FWR3) sequence
ggggtcccagccaggttcagcggcagtgggtctgggaccgatttcaccctcacaattaatcctgtggaagctaatgatactgcaaattattactgt

SEQ ID NO: 193 - protein, 32 aa, Artificial Sequence
  IGKV7-3*01 light chain variable framework region 3 (FWR3) sequence
GVPARFSGSGSGTDFTLTINPVEANDTANYYC

SEQ ID NO: 194 - DNA, 339 bp, Artificial Sequence
  Humanized C2 light chain variable region sequence
gacattgtgctgacccagtctccagcctccttggccgtgtctccaggacagagggccaccatcacctgcagagccagtaagagtgtcagtaccagcggatactcctacatgcactggtatcagcagaaaccaggacaacctcctaaactcctgatttacctggcatccaatctggagagcggggtcccagccaggttcagcggcagtgggtctgggaccgatttcaccctcacaattaatcctgtggaagctaatgatactgcaaattattactgtcagcacagtagggagctgcctttcacattcggcggagggaccaaggtggagatcaaacgaact

SEQ ID NO: 195 - protein, 113 aa, Artificial Sequence
  Humanized C2 light chain variable region sequence
DIVLTQSPASLAVSPGQRATITCRASKSVSTSGYSYMHWYQQKPGQPPKLLIYLASNLESGVPARFSGSGSGTDFTLTINPVEANDTANYYCQHSRELPFTFGGGTKVEIKRT

SEQ ID NO: 196 - DNA, 69 bp, Artificial Sequence; identical to SEQ ID NO: 184
  Humanized C2 light chain variable framework region 1 (FWR1) acid sequence

SEQ ID NO: 197 - protein, 23 aa, Artificial Sequence
  Humanized C2 light chain variable framework region 1 (FWR1) acid sequence
DIVLTQSPASLAVSPGQRATITC

SEQ ID NO: 198 - DNA, 45 bp, Artificial Sequence
  Humanized C2 light chain variable complementarity determining regions 1 (CDR1) sequence
agagccagtaagagtgtcagtaccagcggatactcctacatgcac

SEQ ID NO: 199 - protein, 15 aa, Artificial Sequence
  Humanized C2 light chain variable complementarity determining regions 1 (CDR1) sequence
RASKSVSTSGYSYMH

SEQ ID NO: 200 - DNA, 45 bp, Artificial Sequence; identical to SEQ ID NO: 188
  Humanized C2 heavy light variable framework region 2 (FWR2) acid sequence

SEQ ID NO: 201 - protein, 15 aa, Artificial Sequence
  Humanized C2 heavy light variable framework region 2 (FWR2) acid sequence
WYQQKPGQPPKLLIY

SEQ ID NO: 202 - DNA, 21 bp, Artificial Sequence
  Humanized C2 light chain variable complementarity determining regions 2 (CDR2) sequence
ctggcatccaatctggagagc

SEQ ID NO: 203 - protein, 7 aa, Artificial Sequence
  Humanized C2 light chain variable complementarity determining regions 2 (CDR2) sequence
LASNLES

SEQ ID NO: 204 - DNA, 96 bp, Artificial Sequence; identical to SEQ ID NO: 192
  Humanized C2 light chain variable framework region 3 (FWR3) acid sequence

SEQ ID NO: 205 - protein, 32 aa, Artificial Sequence; identical to SEQ ID NO: 193
  Humanized C2 light chain variable framework region 3 (FWR3) acid sequence

SEQ ID NO: 206 - DNA, 27 bp, Artificial Sequence
  Humanized C2 light chain variable complementarity determining regions 3 (CDR3) sequence
cagcacagtagggagctgcctttcaca

SEQ ID NO: 207 - protein, 9 aa, Artificial Sequence
  Humanized C2 light chain variable complementarity determining regions 3 (CDR3) sequence
QHSRELPFT

SEQ ID NO: 208 - DNA, 27 bp, Artificial Sequence
  Humanized C2 light chain variable complementarity determining regions 3 (CDR3) sequence
ctgcagagtaagaattttcctcccaca

SEQ ID NO: 209 - protein, 9 aa, Artificial Sequence
  Humanized C2 light chain variable complementarity determining regions 3 (CDR3) sequence
LQSKNFPPT

SEQ ID NO: 210 - DNA, 813 bp, Artificial Sequence
  Humanized C2 gBLOCK#6 sequence (Kappa light chain in pCDNA3.1 V5)
actcactatagggagacccaagctggctagttaagcttgggccaccatggagacagacacactcctgctatgggtactgctgctctgggttccaggttccactggtgacgacattgtgctgacccagtctccagcctccttggccgtgtctccaggacagagggccaccatcacctgcagagccagtaagagtgtcagtaccagcggatactcctacatgcactggtatcagcagaaaccaggacaacctcctaaactcctgatttacctggcatccaatctggagagcggggtcccagccaggttcagcggcagtgggtctgggaccgatttcaccctcacaattaatcctgtggaagctaatgatactgcaaattattactgtcagcacagtagggagctgcctttcacattcggcggagggaccaaggtggagatcaaacgaactacggtggctgcaccatctgtcttcatcttcccgccatctgatgagcagttgaaatctggaactgcctctgttgtgtgcctgctgaataacttctatcccagagaggccaaagtacagtggaaggtggataacgccctccaatcgggtaactcccaggagagtgtcacagagcaggacagcaaggacagcacctacagcctcagcagcaccctgacgctgagcaaagcagactacgagaaacacaaagtctacgcctgcgaagtcacccatcagggcctgagctcgcccgtcacaaagagcttcaacaggggagagtgttagtaagtttaaacccgctgatcagcctcgactgtgccttctagttg

SEQ ID NO: 211 - DNA, 32 bp, Artificial Sequence; identical to SEQ ID NO: 161
  pCDNA3.1 V5 5' overlapping sequence

SEQ ID NO: 212 - DNA, 33 bp, Artificial Sequence; identical to SEQ ID NO: 64
  pCDNA3.1 V5 3' overlapping sequence

SEQ ID NO: 213 - DNA, 748 bp, Artificial Sequence
  Humanized C2 gBLOCK#7 sequence (Kappa light chain in pSEC Tag2)
tgctctgggttccaggttccactggtgacgcggcccagccggccgacattgtgctgacccagtctccagcctccttggccgtgtctccaggacagagggccaccatcacctgcagagccagtaagagtgtcagtaccagcggatactcctacatgcactggtatcagcagaaaccaggacaacctcctaaactcctgatttacctggcatccaatctggagagcggggtcccagccaggttcagcggcagtgggtctgggaccgatttcaccctcacaattaatcctgtggaagctaatgatactgcaaattattactgtcagcacagtagggagctgcctttcacattcggcggagggaccaaggtggagatcaaacgaactacggtggctgcaccatctgtcttcatcttcccgccatctgatgagcagttgaaatctggaactgcctctgttgtgtgcctgctgaataacttctatcccagagaggccaaagtacagtggaaggtggataacgccctccaatcgggtaactcccaggagagtgtcacagagcaggacagcaaggacagcacctacagcctcagcagcaccctgacgctgagcaaagcagactacgagaaacacaaagtctacgcctgcgaagtcacccatcagggcctgagctcgcccgtcacaaagagcttcaacaggggagagtgttagtaagtttaaacccgctgatcagcctcgactgtgccttctagttg

SEQ ID NO: 214 - DNA, 31 bp, Artificial Sequence; identical to SEQ ID NO: 166
  pSEC Tag2 5' overlapping sequence

SEQ ID NO: 215 - DNA, 33 bp, Artificial Sequence; identical to SEQ ID NO: 64
  pSEC Tag2 3' overlapping sequence

SEQ ID NO: 216 - DNA, 813 bp, Artificial Sequence
  Humanized C2 gBLOCK#8 sequence (lambda light chain in pCDNA3.1 V5)
actcactatagggagacccaagctggctagttaagcttgggccaccatggagacagacacactcctgctatgggtactgctgctctgggttccaggttccactggtgacgacattgtgctgacccagtctccagcctccttggccgtgtctccaggacagagggccaccatcacctgcagagccagtaagagtgtcagtaccagcggatactcctacatgcactggtatcagcagaaaccaggacaacctcctaaactcctgatttacctggcatccaatctggagagcggggtcccagccaggttcagcggcagtgggtctgggaccgatttcaccctcacaattaatcctgtggaagctaatgatactgcaaattattactgtcagcacagtagggagctgcctttcacattcggcggagggaccaaggtggagatcaaacgaactggtcagcccaaggctgccccctcggtcactctgttcccgccctcctctgaggagcttcaagccaacaaggccacactggtgtgtctcataagtgacttctacccgggagccgtgacagtggcctggaaggcagatagcagccccgtcaaggcgggagtggagaccaccacaccctccaaacaaagcaacaacaagtacgcggccagcagctatctgagcctgacgcctgagcagtggaagtcccacagaagctacagctgccaggtcacgcatgaagggagcaccgtggagaagacagtggcccctacagaatgttcatagtaagtttaaacccgctgatcagcctcgactgtgccttctagttg

SEQ ID NO: 217 - DNA, 32 bp, Artificial Sequence; identical to SEQ ID NO: 161
  pCDNA3.1 V5 5' overlapping sequence

SEQ ID NO: 218 - DNA, 33 bp, Artificial Sequence; identical to SEQ ID NO: 64
  pCDNA3.1 V5 3' overlapping sequence

SEQ ID NO: 219 - DNA, 748 bp, Artificial Sequence
  Humanized C2 gBLOCK#9 sequence (lambda light chain in pSEC Tag2)
tgctctgggttccaggttccactggtgacgcggcccagccggccgacattgtgctgacccagtctccagcctccttggccgtgtctccaggacagagggccaccatcacctgcagagccagtaagagtgtcagtaccagcggatactcctacatgcactggtatcagcagaaaccaggacaacctcctaaactcctgatttacctggcatccaatctggagagcggggtcccagccaggttcagcggcagtgggtctgggaccgatttcaccctcacaattaatcctgtggaagctaatgatactgcaaattattactgtcagcacagtagggagctgcctttcacattcggcggagggaccaaggtggagatcaaacgaactggtcagcccaaggctgccccctcggtcactctgttcccgccctcctctgaggagcttcaagccaacaaggccacactggtgtgtctcataagtgacttctacccgggagccgtgacagtggcctggaaggcagatagcagccccgtcaaggcgggagtggagaccaccacaccctccaaacaaagcaacaacaagtacgcggccagcagctatctgagcctgacgcctgagcagtggaagtcccacagaagctacagctgccaggtcacgcatgaagggagcaccgtggagaagacagtggcccctacagaatgttcatagtaagtttaaacccgctgatcagcctcgactgtgccttctagttg

SEQ ID NO: 220 - DNA, 31 bp, Artificial Sequence; identical to SEQ ID NO: 166
  pSEC Tag2 5' overlapping sequence

SEQ ID NO: 221 - DNA, 33 bp, Artificial Sequence; identical to SEQ ID NO: 64
  pSEC Tag2 3' overlapping sequence

SEQ ID NO: 222 - DNA, 63 bp, Artificial Sequence
  Murine Ig kappa chain leader sequence
atggagacagacacactcctgctatgggtactgctgctctgggttccaggttccactggtgac

SEQ ID NO: 223 - protein, 21 aa, Artificial Sequence
  Murine Ig kappa chain leader sequence
METDTLLLWVLLLWVPGSTGD

SEQ ID NO: 224 - DNA, 60 bp, Artificial Sequence
  Interleukin-2 (IL-2) leader sequence
atgtacaggatgcaactcctgtcttgcattgcactaagtcttgcacttgtcacaaacagt

SEQ ID NO: 225 - protein, 20 aa, Artificial Sequence
  Interleukin-2 (IL-2) leader sequence
MYRMQLLSCIALSLALVTNS

SEQ ID NO: 226 - DNA, 48 bp, Artificial Sequence
  CD33 leader sequence
atgcctcttctgcttctgcttcctctgctttgggctggagctcttgct

SEQ ID NO: 227 - protein, 16 aa, Artificial Sequence
  CD33 leader sequence
MPLLLLLPLLWAGALA

SEQ ID NO: 228 - DNA, 57 bp, Artificial Sequence
  IGHV3-21*03 leader sequence
atggaactggggctccgctgggttttccttgttgctattttagaaggtgtccagtgt

SEQ ID NO: 229 - protein, 19 aa, Artificial Sequence
  IGHV3-21*03 leader sequence
MELGLRWVFLVAILEGVQC

SEQ ID NO: 230 - DNA, 60 bp, Artificial Sequence
  IGHV3-11*02 leader sequence
atggaagccccagcgcagcttctcttcctcctgctactctggctcccagataccactgga

SEQ ID NO: 231 - protein, 20 aa, Artificial Sequence
  IGHV3-11*02 leader sequence
MEAPAQLLFLLLLWLPDTTG

SEQ ID NO: 232 - DNA, 729 bp, Artificial Sequence
  Humanized E6 single chain GS3
gaggtgcagctggtggagtctgggggaggcctggtcaagcctggggggtccctgagactctcctgtgcagcctctggattcaccttcagtaggtatggcatgagctgggtccgccaggctccagggaagaggctggagtgggtctcaaccattagtggcggaggcacctacatatactacccagactcagtgaagggccgattcaccatctccagagacaacgccaagaacaccctgtatctgcaaatgaacagcctgagagccgaggacacggctgtgtattactgtaccagagataactatggccgcaactatgattatggcatggattattggggccagggcaccctggtgaccgtgagcagcggcggtggcggatccggcggtggcggatccggcggtggcggatccgaaattgtgttgacacagtctccagccaccctgtctttgtctccaggggaaagagccaccctcacctgcagcgccaccagcagtgttagctacatccactggtaccaacagaggcctggccagagccccaggctcctcatctatagcacctccaacctggccagcggcatcccagccaggttcagtggcagtgggtctgggagcgactacactctcaccatcagcagcctagagcctgaagattttgcagtttattactgtcagcagcgtagcagctcccctttcacctttggcagcggcaccaaagtggaaattaaa

SEQ ID NO: 233 - protein, 243 aa, Artificial Sequence
  Humanized E6 single chain GS3
EVQLVESGGGLVKPGGSLRLSCAASGFTFSRYGMSWVRQAPGKRLEWVSTISGGGTYIYYPDSVKGRFTISRDNAKNTLYLQMNSLRAEDTAVYYCTRDNYGRNYDYGMDYWGQGTLVTVSSGGGGSGGGGSGGGGSEIVLTQSPATLSLSPGERATLTCSATSSVSYIHWYQQRPGQSPRLLIYSTSNLASGIPARFSGSGSGSDYTLTISSLEPEDFAVYYCQQRSSSPFTFGSGTKVEIK

SEQ ID NO: 234 - DNA, 747 bp, Artificial Sequence
  Humanized E6 single chain IgG1noC
gaggtgcagctggtggagtctgggggaggcctggtcaagcctggggggtccctgagactctcctgtgcagcctctggattcaccttcagtaggtatggcatgagctgggtccgccaggctccagggaagaggctggagtgggtctcaaccattagtggcggaggcacctacatatactacccagactcagtgaagggccgattcaccatctccagagacaacgccaagaacaccctgtatctgcaaatgaacagcctgagagccgaggacacggctgtgtattactgtaccagagataactatggccgcaactatgattatggcatggattattggggccagggcaccctggtgaccgtgagcagcgataaaacccatactaaaccgccaaaaccggcgccggaactgctgggtggtcctggtaccggtgaaattgtgttgacacagtctccagccaccctgtctttgtctccaggggaaagagccaccctcacctgcagcgccaccagcagtgttagctacatccactggtaccaacagaggcctggccagagccccaggctcctcatctatagcacctccaacctggccagcggcatcccagccaggttcagtggcagtgggtctgggagcgactacactctcaccatcagcagcctagagcctgaagattttgcagtttattactgtcagcagcgtagcagctcccctttcacctttggcagcggcaccaaagtggaaattaaa

SEQ ID NO: 235 - protein, 249 aa, Artificial Sequence
  Humanized E6 single chain IgG1noC
EVQLVESGGGLVKPGGSLRLSCAASGFTFSRYGMSWVRQAPGKRLEWVSTISGGGTYIYYPDSVKGRFTISRDNAKNTLYLQMNSLRAEDTAVYYCTRDNYGRNYDYGMDYWGQGTLVTVSSDKTHTKPPKPAPELLGGPGTGEIVLTQSPATLSLSPGERATLTCSATSSVSYIHWYQQRPGQSPRLLIYSTSNLASGIPARFSGSGSGSDYTLTISSLEPEDFAVYYCQQRSSSPFTFGSGTKVEIK

SEQ ID NO: 236 - DNA, 813 bp, Artificial Sequence
  Humanized E6 single chain X4 (linker is IgG1 and IgG2 modified hinge region)
gaggtgcagctggtggagtctgggggaggcctggtcaagcctggggggtccctgagactctcctgtgcagcctctggattcaccttcagtaggtatggcatgagctgggtccgccaggctccagggaagaggctggagtgggtctcaaccattagtggcggaggcacctacatatactacccagactcagtgaagggccgattcaccatctccagagacaacgccaagaacaccctgtatctgcaaatgaacagcctgagagccgaggacacggctgtgtattactgtaccagagataactatggccgcaactatgattatggcatggattattggggccagggcaccctggtgaccgtgagcagcgataaaacccatactaaaccgccaaaaccggcgccggaactgctgggtggtcctggtaccggtactggtggtccgactattaaacctccgaaacctccgaaacctgctccgaacctgctgggtggtccggaaattgtgttgacacagtctccagccaccctgtctttgtctccaggggaaagagccaccctcacctgcagcgccaccagcagtgttagctacatccactggtaccaacagaggcctggccagagccccaggctcctcatctatagcacctccaacctggccagcggcatcccagccaggttcagtggcagtgggtctgggagcgactacactctcaccatcagcagcctagagcctgaagattttgcagtttattactgtcagcagcgtagcagctcccctttcacctttggcagcggcaccaaagtggaaattaaa

SEQ ID NO: 237 - protein, 271 aa, Artificial Sequence
  Humanized E6 single chain X4 (linker is IgG1 and IgG2 modified hinge region)
EVQLVESGGGLVKPGGSLRLSCAASGFTFSRYGMSWVRQAPGKRLEWVSTISGGGTYIYYPDSVKGRFTISRDNAKNTLYLQMNSLRAEDTAVYYCTRDNYGRNYDYGMDYWGQGTLVTVSSDKTHTKPPKPAPELLGGPGTGTGGPTIKPPKPPKPAPNLLGGPEIVLTQSPATLSLSPGERATLTCSATSSVSYIHWYQQRPGQSPRLLIYSTSNLASGIPARFSGSGSGSDYTLTISSLEPEDFAVYYCQQRSSSPFTFGSGTKVEIK

SEQ ID NO: 238 - DNA, 747 bp, Artificial Sequence
  Humanized C2 single chain GS3
gaggtgcagctggtggagtctgggggaggcctggtcaagcctggggggtccctgagactctcctgtgcagcctctggattcaccttcagtggctatgccatgagctgggtccgccaggctccagggaaggggctggagtgggtctcaaccattagtagtggcggaacctacatatactaccccgactcagtgaagggccgattcaccatctccagagacaacgccaagaactcactgtatctgcaaatgaacagcctgagagccgaggacacggccgtgtattactgtgcgagacttgggggggataattactacgaatacttcgatgtctggggcaaagggaccacggtcaccgtctcctccggcggtggcggatccggcggtggcggatccggcggtggcggatccgacattgtgctgacccagtctccagcctccttggccgtgtctccaggacagagggccaccatcacctgcagagccagtaagagtgtcagtaccagcggatactcctacatgcactggtatcagcagaaaccaggacaacctcctaaactcctgatttacctggcatccaatctggagagcggggtcccagccaggttcagcggcagtgggtctgggaccgatttcaccctcacaattaatcctgtggaagctaatgatactgcaaattattactgtcagcacagtagggagctgcctttcacattcggcggagggaccaaggtggagatcaaacgaact

SEQ ID NO: 239 - protein, 249 aa, Artificial Sequence
  Humanized C2 single chain GS3
EVQLVESGGGLVKPGGSLRLSCAASGFTFSGYAMSWVRQAPGKGLEWVSTISSGGTYIYYPDSVKGRFTISRDNAKNSLYLQMNSLRAEDTAVYYCARLGGDNYYEYFDVWGKGTTVTVSSGGGGSGGGGSGGGGSDIVLTQSPASLAVSPGQRATITCRASKSVSTSGYSYMHWYQQKPGQPPKLLIYLASNLESGVPARFSGSGSGTDFTLTINPVEANDTANYYCQHSRELPFTFGGGTKVEIKRT

SEQ ID NO: 240 - DNA, 765 bp, Artificial Sequence
  Humanized C2 single chain IgG (no Cysteine)
gaggtgcagctggtggagtctgggggaggcctggtcaagcctggggggtccctgagactctcctgtgcagcctctggattcaccttcagtggctatgccatgagctgggtccgccaggctccagggaaggggctggagtgggtctcaaccattagtagtggcggaacctacatatactaccccgactcagtgaagggccgattcaccatctccagagacaacgccaagaactcactgtatctgcaaatgaacagcctgagagccgaggacacggccgtgtattactgtgcgagacttgggggggataattactacgaatacttcgatgtctggggcaaagggaccacggtcaccgtctcctccgataaaacccatactaaaccgccaaaaccggcgccggaactgctgggtggtcctggtaccggtgacattgtgctgacccagtctccagcctccttggccgtgtctccaggacagagggccaccatcacctgcagagccagtaagagtgtcagtaccagcggatactcctacatgcactggtatcagcagaaaccaggacaacctcctaaactcctgatttacctggcatccaatctggagagcggggtcccagccaggttcagcggcagtgggtctgggaccgatttcaccctcacaattaatcctgtggaagctaatgatactgcaaattattactgtcagcacagtagggagctgcctttcacattcggcggagggaccaaggtggagatcaaacgaact

SEQ ID NO: 241 - protein, 255 aa, Artificial Sequence
  Humanized C2 single chain IgG (no Cysteine)
EVQLVESGGGLVKPGGSLRLSCAASGFTFSGYAMSWVRQAPGKGLEWVSTISSGGTYIYYPDSVKGRFTISRDNAKNSLYLQMNSLRAEDTAVYYCARLGGDNYYEYFDVWGKGTTVTVSSDKTHTKPPKPAPELLGGPGTGDIVLTQSPASLAVSPGQRATITCRASKSVSTSGYSYMHWYQQKPGQPPKLLIYLASNLESGVPARFSGSGSGTDFTLTINPVEANDTANYYCQHSRELPFTFGGGTKVEIKRT

SEQ ID NO: 242 - DNA, 831 bp, Artificial Sequence
  Humanized C2 single chain X4 (linker is IgG1 and IgG2 modified hinge region)
gaggtgcagctggtggagtctgggggaggcctggtcaagcctggggggtccctgagactctcctgtgcagcctctggattcaccttcagtggctatgccatgagctgggtccgccaggctccagggaaggggctggagtgggtctcaaccattagtagtggcggaacctacatatactaccccgactcagtgaagggccgattcaccatctccagagacaacgccaagaactcactgtatctgcaaatgaacagcctgagagccgaggacacggccgtgtattactgtgcgagacttgggggggataattactacgaatacttcgatgtctggggcaaagggaccacggtcaccgtctcctccgataaaacccatactaaaccgccaaaaccggcgccggaactgctgggtggtcctggtaccggtactggtggtccgactattaaacctccgaaacctccgaaacctgctccgaacctgctgggtggtccggacattgtgctgacccagtctccagcctccttggccgtgtctccaggacagagggccaccatcacctgcagagccagtaagagtgtcagtaccagcggatactcctacatgcactggtatcagcagaaaccaggacaacctcctaaactcctgatttacctggcatccaatctggagagcggggtcccagccaggttcagcggcagtgggtctgggaccgatttcaccctcacaattaatcctgtggaagctaatgatactgcaaattattactgtcagcacagtagggagctgcctttcacattcggcggagggaccaaggtggagatcaaacgaact

SEQ ID NO: 243 - protein, 277 aa, Artificial Sequence
  Humanized C2 single chain X4 (linker is IgG1 and IgG2 modified hinge region)
EVQLVESGGGLVKPGGSLRLSCAASGFTFSGYAMSWVRQAPGKGLEWVSTISSGGTYIYYPDSVKGRFTISRDNAKNSLYLQMNSLRAEDTAVYYCARLGGDNYYEYFDVWGKGTTVTVSSDKTHTKPPKPAPELLGGPGTGTGGPTIKPPKPPKPAPNLLGGPDIVLTQSPASLAVSPGQRATITCRASKSVSTSGYSYMHWYQQKPGQPPKLLIYLASNLESGVPARFSGSGSGTDFTLTINPVEANDTANYYCQHSRELPFTFGGGTKVEIKRT

SEQ ID NO: 244 - DNA, 744 bp, Artificial Sequence
  Humanized C3 single chain GS3
caggttcagctggtgcagtctggagctgaggtgaagaagcctggggcctcagtgaaggtctcctgcaaggcttctggttacacctttaccgactacgccatgaactgggtgcgacaggcccctggacaagggcttgagtggatgggagtgatcagcaccttcagcggtaacacaaacttcaaccagaagttcaagggcagagtcaccatgaccacagacacatccacgagcacagcctacatggagctgaggagcctgagatctgacgacacggccgtgtattactgtgcgagaagcgactactacggcccatacttcgactactggggccagggcaccaccctgaccgtgtccagcggcggtggcggatccggcggtggcggatccggcggtggcggatccgatattgtgatgacccagactccactctctctgtccgtcacccctggacagccggcctccatctcctgcaggtctagtcagaccattgtccatagtaatggaaacacctatttggagtggtacctgcagaagccaggccagtctccacagctcctgatctataaggtttccaaccggttctctggagtgccagataggttcagtggcagcgggtcagggacagatttcacactgaaaatcagccgggtggaggctgaggatgttggggtttattactgcttccaaggtagccacgtgcctttcaccttcggcggagggaccaaggtggagatcaaacgaact

SEQ ID NO: 245 - protein, 248 aa, Artificial Sequence
  Humanized C3 single chain GS3
QVQLVQSGAEVKKPGASVKVSCKASGYTFTDYAMNWVRQAPGQGLEWMGVISTFSGNTNFNQKFKGRVTMTTDTSTSTAYMELRSLRSDDTAVYYCARSDYYGPYFDYWGQGTTLTVSSGGGGSGGGGSGGGGSDIVMTQTPLSLSVTPGQPASISCRSSQTIVHSNGNTYLEWYLQKPGQSPQLLIYKVSNRFSGVPDRFSGSGSGTDFTLKISRVEAEDVGVYYCFQGSHVPFTFGGGTKVEIKRT

SEQ ID NO: 246 - DNA, 762 bp, Artificial Sequence
  Humanized C3 single chain IgG1 (no Cysteine)
caggttcagctggtgcagtctggagctgaggtgaagaagcctggggcctcagtgaaggtctcctgcaaggcttctggttacacctttaccgactacgccatgaactgggtgcgacaggcccctggacaagggcttgagtggatgggagtgatcagcaccttcagcggtaacacaaacttcaaccagaagttcaagggcagagtcaccatgaccacagacacatccacgagcacagcctacatggagctgaggagcctgagatctgacgacacggccgtgtattactgtgcgagaagcgactactacggcccatacttcgactactggggccagggcaccaccctgaccgtgtccagcgataaaacccatactaaaccgccaaaaccggcgccggaactgctgggtggtcctggtaccggtgatattgtgatgacccagactccactctctctgtccgtcacccctggacagccggcctccatctcctgcaggtctagtcagaccattgtccatagtaatggaaacacctatttggagtggtacctgcagaagccaggccagtctccacagctcctgatctataaggtttccaaccggttctctggagtgccagataggttcagtggcagcgggtcagggacagatttcacactgaaaatcagccgggtggaggctgaggatgttggggtttattactgcttccaaggtagccacgtgcctttcaccttcggcggagggaccaaggtggagatcaaacgaact

SEQ ID NO: 247 - protein, 254 aa, Artificial Sequence
  Humanized C3 single chain IgG1 (no Cysteine)
QVQLVQSGAEVKKPGASVKVSCKASGYTFTDYAMNWVRQAPGQGLEWMGVISTFSGNTNFNQKFKGRVTMTTDTSTSTAYMELRSLRSDDTAVYYCARSDYYGPYFDYWGQGTTLTVSSDKTHTKPPKPAPELLGGPGTGDIVMTQTPLSLSVTPGQPASISCRSSQTIVHSNGNTYLEWYLQKPGQSPQLLIYKVSNRFSGVPDRFSGSGSGTDFTLKISRVEAEDVGVYYCFQGSHVPFTFGGGTKVEIKRT

SEQ ID NO: 248 - DNA, 828 bp, Artificial Sequence
  Humanized C3 single chain X4 (linker is IgG1 and IgG2 modified hinge region)
caggttcagctggtgcagtctggagctgaggtgaagaagcctggggcctcagtgaaggtctcctgcaaggcttctggttacacctttaccgactacgccatgaactgggtgcgacaggcccctggacaagggcttgagtggatgggagtgatcagcaccttcagcggtaacacaaacttcaaccagaagttcaagggcagagtcaccatgaccacagacacatccacgagcacagcctacatggagctgaggagcctgagatctgacgacacggccgtgtattactgtgcgagaagcgactactacggcccatacttcgactactggggccagggcaccaccctgaccgtgtccagcgataaaacccatactaaaccgccaaaaccggcgccggaactgctgggtggtcctggtaccggtactggtggtccgactattaaacctccgaaacctccgaaacctgctccgaacctgctgggtggtccggatattgtgatgacccagactccactctctctgtccgtcacccctggacagccggcctccatctcctgcaggtctagtcagaccattgtccatagtaatggaaacacctatttggagtggtacctgcagaagccaggccagtctccacagctcctgatctataaggtttccaaccggttctctggagtgccagataggttcagtggcagcgggtcagggacagatttcacactgaaaatcagccgggtggaggctgaggatgttggggtttattactgcttccaaggtagccacgtgcctttcaccttcggcggagggaccaaggtggagatcaaacgaact

SEQ ID NO: 249 - protein, 276 aa, Artificial Sequence
  Humanized C3 single chain X4 (linker is IgG1 and IgG2 modified hinge region)
QVQLVQSGAEVKKPGASVKVSCKASGYTFTDYAMNWVRQAPGQGLEWMGVISTFSGNTNFNQKFKGRVTMTTDTSTSTAYMELRSLRSDDTAVYYCARSDYYGPYFDYWGQGTTLTVSSDKTHTKPPKPAPELLGGPGTGTGGPTIKPPKPPKPAPNLLGGPDIVMTQTPLSLSVTPGQPASISCRSSQTIVHSNGNTYLEWYLQKPGQSPQLLIYKVSNRFSGVPDRFSGSGSGTDFTLKISRVEAEDVGVYYCFQGSHVPFTFGGGTKVEIKRT

SEQ ID NO: 250 - DNA, 741 bp, Artificial Sequence
  Humanized C8 single chain GS3 (linker is [Gly4Ser1]3)
gaggtgcagctggtggagtctgggggaggcctggtcaagcctggggggtccctgagactctcctgtgcagcctctggattcaccttcagtggctatgccatgagctgggtccgccaggctccagggaaggggctggagtgggtctcaaccattagtagtggcggaacctacatatactaccctgactcagtgaagggccgattcaccatctccagagacaacgccaagaactcactgtatctgcaaatgaacagcctgagagccgaggacacggccgtgtattactgtgcgagactgggcggcgataactattatgaatattggggcaaagggaccacggtcaccgtctcctccggcggtggcggatccggcggtggcggatccggcggtggcggatccgacatcgtgatgacccagtctccagactccctggctgtgtctctgggcgagagggccaccatcaactgcagggccagcaagagtgttagcaccagcggctacagctacatgcactggtaccagcagaaaccaggacagcctcctaagctgctcatttacctggtgtctaacctggaatccggggtccctgaccgattcagtggcagcgggtctgggacagatttcactctcaccatcagcagcctgcaggctgaagatgtggcagtttattactgtcaacacattcgggaactgaccaggagtgaattcggcggagggaccaaggtggagatcaaacgaact

SEQ ID NO: 251 - protein, 247 aa, Artificial Sequence
  Humanized C8 single chain GS3 (linker is [Gly4Ser1]3)
EVQLVESGGGLVKPGGSLRLSCAASGFTFSGYAMSWVRQAPGKGLEWVSTISSGGTYIYYPDSVKGRFTISRDNAKNSLYLQMNSLRAEDTAVYYCARLGGDNYYEYWGKGTTVTVSSGGGGSGGGGSGGGGSDIVMTQSPDSLAVSLGERATINCRASKSVSTSGYSYMHWYQQKPGQPPKLLIYLVSNLESGVPDRFSGSGSGTDFTLTISSLQAEDVAVYYCQHIRELTRSEFGGGTKVEIKRT

SEQ ID NO: 252 - DNA, 759 bp, Artificial Sequence
  Humanized C8 single chain IgG1 (no Cysteine)
gaggtgcagctggtggagtctgggggaggcctggtcaagcctggggggtccctgagactctcctgtgcagcctctggattcaccttcagtggctatgccatgagctgggtccgccaggctccagggaaggggctggagtgggtctcaaccattagtagtggcggaacctacatatactaccctgactcagtgaagggccgattcaccatctccagagacaacgccaagaactcactgtatctgcaaatgaacagcctgagagccgaggacacggccgtgtattactgtgcgagactgggcggcgataactattatgaatattggggcaaagggaccacggtcaccgtctcctccgataaaacccatactaaaccgccaaaaccggcgccggaactgctgggtggtcctggtaccggtgacatcgtgatgacccagtctccagactccctggctgtgtctctgggcgagagggccaccatcaactgcagggccagcaagagtgttagcaccagcggctacagctacatgcactggtaccagcagaaaccaggacagcctcctaagctgctcatttacctggtgtctaacctggaatccggggtccctgaccgattcagtggcagcgggtctgggacagatttcactctcaccatcagcagcctgcaggctgaagatgtggcagtttattactgtcaacacattcgggaactgaccaggagtgaattcggcggagggaccaaggtggagatcaaacgaact

SEQ ID NO: 253 - protein, 253 aa, Artificial Sequence
  Humanized C8 single chain IgG1 (no Cysteine)
EVQLVESGGGLVKPGGSLRLSCAASGFTFSGYAMSWVRQAPGKGLEWVSTISSGGTYIYYPDSVKGRFTISRDNAKNSLYLQMNSLRAEDTAVYYCARLGGDNYYEYWGKGTTVTVSSDKTHTKPPKPAPELLGGPGTGDIVMTQSPDSLAVSLGERATINCRASKSVSTSGYSYMHWYQQKPGQPPKLLIYLVSNLESGVPDRFSGSGSGTDFTLTISSLQAEDVAVYYCQHIRELTRSEFGGGTKVEIKRT

SEQ ID NO: 254 - DNA, 825 bp, Artificial Sequence
  Humanized C8 single chain X4 (linker is IgG1 and IgG2 modified hinge region)
gaggtgcagctggtggagtctgggggaggcctggtcaagcctggggggtccctgagactctcctgtgcagcctctggattcaccttcagtggctatgccatgagctgggtccgccaggctccagggaaggggctggagtgggtctcaaccattagtagtggcggaacctacatatactacccagactcagtgaagggccgattcaccatctccagagacaacgccaagaactcactgtatctgcaaatgaacagcctgagagccgaggacacggccgtgtattactgtgcgagactgggcggcgacaattactatgagtattggggcaaagggaccacggtcaccgtctcctccgataaaacccatactaaaccgccaaaaccggcgccggaactgctgggtggtcctggtaccggtactggtggtccgactattaaacctccgaaacctccgaaacctgctccgaacctgctgggtggtccggacatcgtgatgacccagtctccagactccctggctgtgtctctgggcgagagggccaccatcaactgcagggccagcaagagtgttagcaccagcggctacagctacatgcactggtaccagcagaaaccaggacagcctcctaagctgctcatttacctggtgtctaacctggaatccggggtccctgaccgattcagtggcagcgggtctgggacagatttcactctcaccatcagcagcctgcaggctgaagatgtggcagtttattactgtcaacacattcgggaactgaccaggagtgaattcggcggagggaccaaggtggagatcaaacgaact

SEQ ID NO: 255 - protein, 275 aa, Artificial Sequence
  Humanized C8 single chain X4 (linker is IgG1 and IgG2 modified hinge region)
EVQLVESGGGLVKPGGSLRLSCAASGFTFSGYAMSWVRQAPGKGLEWVSTISSGGTYIYYPDSVKGRFTISRDNAKNSLYLQMNSLRAEDTAVYYCARLGGDNYYEYWGKGTTVTVSSDKTHTKPPKPAPELLGGPGTGTGGPTIKPPKPPKPAPNLLGGPDIVMTQSPDSLAVSLGERATINCRASKSVSTSGYSYMHWYQQKPGQPPKLLIYLVSNLESGVPDRFSGSGSGTDFTLTISSLQAEDVAVYYCQHIRELTRSEFGGGTKVEIKRT

SEQ ID NO: 256 - DNA, 1509 bp, Artificial Sequence
  pSECTag2 E6 scFV-FC
atggagacagacacactcctgctatgggtactgctgctctgggttccaggttccactggtgacgcggcccagccggccgaggtgcagctggtggagtctgggggaggcctggtcaagcctggggggtccctgagactctcctgtgcagcctctggattcaccttcagtaggtatggcatgagctgggtccgccaggctccagggaagaggctggagtgggtctcaaccattagtggcggaggcacctacatatactacccagactcagtgaagggccgattcaccatctccagagacaacgccaagaacaccctgtatctgcaaatgaacagcctgagagccgaggacacggctgtgtattactgtaccagagataactatggccgcaactatgattatggcatggattattggggccagggcaccctggtgaccgtgagcagcggcggtggcggatccggcggtggcggatccggcggtggcggatccgaaattgtgttgacacagtctccagccaccctgtctttgtctccaggggaaagagccaccctcacctgcagcgccaccagcagtgttagctacatccactggtaccaacagaggcctggccagagccccaggctcctcatctatagcacctccaacctggccagcggcatcccagccaggttcagtggcagtgggtctgggagcgactacactctcaccatcagcagcctagagcctgaagattttgcagtttattactgtcagcagcgtagcagctcccctttcacctttggcagcggcaccaaagtggaaattaaagagcccaaatcttgtgacaaaactcacacatgcccaccgtgcccagcacctgaactcctggggggaccgtcagtcttcctcttccccccaaaacccaaggacaccctcatgatctcccggacccctgaggtcacatgcgtggtggtggacgtgagccacgaagaccctgaggtcaagttcaactggtacgtggacggcgtggaggtgcataatgccaagacaaagccgcgggaggagcagtacaacagcacgtaccgtgtggtcagcgtcctcaccgtcctgcaccaggactggctgaatggcaaggagtacaagtgcaaggtctccaacaaagccctcccagcccccatcgagaaaaccatctccaaagccaaagggcagccccgagaaccacaggtgtacaccctgcccccatcccgggaggagatgaccaagaaccaggtcagcctgacctgcctggtcaaaggcttctatcccagcgacatcgccgtggagtgggagagcaatgggcagccggagaacaactacaagaccacgcctcccgtgctggactccgacggctccttcttcctctacagcaagctcaccgtggacaagagcaggtggcagcaggggaacgtcttctcatgctccgtgatgcatgaggctctgcacaaccactacacgcagaagagcctctccctgtctccgggtaaatgataa

SEQ ID NO: 257 - protein, 501 aa, Artificial Sequence
  pSECTag2 E6 scFV-FC
METDTLLLWVLLLWVPGSTGDAAQPAEVQLVESGGGLVKPGGSLRLSCAASGFTFSRYGMSWVRQAPGKRLEWVSTISGGGTYIYYPDSVKGRFTISRDNAKNTLYLQMNSLRAEDTAVYYCTRDNYGRNYDYGMDYWGQGTLVTVSSGGGGSGGGGSGGGGSEIVLTQSPATLSLSPGERATLTCSATSSVSYIHWYQQRPGQSPRLLIYSTSNLASGIPARFSGSGSGSDYTLTISSLEPEDFAVYYCQQRSSSPFTFGSGTKVEIKEPKSCDKTHTCPPCPAPELLGGPSVFLFPPKPKDTLMISRTPEVTCVVVDVSHEDPEVKFNWYVDGVEVHNAKTKPREEQYNSTYRVVSVLTVLHQDWLNGKEYKCKVSNKALPAPIEKTISKAKGQPREPQVYTLPPSREEMTKNQVSLTCLVKGFYPSDIAVEWESNGQPENNYKTTPPVLDSDGSFFLYSKLTVDKSRWQQGNVFSCSVMHEALHNHYTQKSLSLSPGK

SEQ ID NO: 258 - DNA, 496 bp, Artificial Sequence
  E6 scFC-FC 1 gBLOCk sequence
tgctctgggttccaggttccactggtgacgcggcccagccggccgaggtgcagctggtggagtctgggggaggcctggtcaagcctggggggtccctgagactctcctgtgcagcctctggattcaccttcagtaggtatggcatgagctgggtccgccaggctccagggaagaggctggagtgggtctcaaccattagtggcggaggcacctacatatactacccagactcagtgaagggccgattcaccatctccagagacaacgccaagaacaccctgtatctgcaaatgaacagcctgagagccgaggacacggctgtgtattactgtaccagagataactatggccgcaactatgattatggcatggattattggggccagggcaccctggtgaccgtgagcagcggcggtggcggatccggcggtggcggatccggcggtggcggatccgaaattgtgttgacacagtctccagccaccctgtctttgtc

SEQ ID NO: 259 - DNA, 583 bp, Artificial Sequence
  E6 scFC-FC 2 gBLOCk sequence
aattgtgttgacacagtctccagccaccctgtctttgtctccaggggaaagagccaccctcacctgcagcgccaccagcagtgttagctacatccactggtaccaacagaggcctggccagagccccaggctcctcatctatagcacctccaacctggccagcggcatcccagccaggttcagtggcagtgggtctgggagcgactacactctcaccatcagcagcctagagcctgaagattttgcagtttattactgtcagcagcgtagcagctcccctttcacctttggcagcggcaccaaagtggaaattaaagagcccaaatcttgtgacaaaactcacacatgcccaccgtgcccagcacctgaactcctggggggaccgtcagtcttcctcttccccccaaaacccaaggacaccctcatgatctcccggacccctgaggtcacatgcgtggtggtggacgtgagccacgaagaccctgaggtcaagttcaactggtacgtggacggcgtggaggtgcataatgccaagacaaagccgcgggaggagcagtacaacagcacgtaccgtgtggtcagc

SEQ ID NO: 260 - DNA, 1527 bp, Artificial Sequence
  pSECTag2 C2 scFV-FC
atggagacagacacactcctgctatgggtactgctgctctgggttccaggttccactggtgacgcggcccagccggccgaggtgcagctggtggagtctgggggaggcctggtcaagcctggggggtccctgagactctcctgtgcagcctctggattcaccttcagtggctatgccatgagctgggtccgccaggctccagggaaggggctggagtgggtctcaaccattagtagtggcggaacctacatatactaccccgactcagtgaagggccgattcaccatctccagagacaacgccaagaactcactgtatctgcaaatgaacagcctgagagccgaggacacggccgtgtattactgtgcgagacttgggggggataattactacgaatacttcgatgtctggggcaaagggaccacggtcaccgtctcctccggcggtggcggatccggcggtggcggatccggcggtggcggatccgacattgtgctgacccagtctccagcctccttggccgtgtctccaggacagagggccaccatcacctgcagagccagtaagagtgtcagtaccagcggatactcctacatgcactggtatcagcagaaaccaggacaacctcctaaactcctgatttacctggcatccaatctggagagcggggtcccagccaggttcagcggcagtgggtctgggaccgatttcaccctcacaattaatcctgtggaagctaatgatactgcaaattattactgtcagcacagtagggagctgcctttcacattcggcggagggaccaaggtggagatcaaacgaactgagcccaaatcttgtgacaaaactcacacatgcccaccgtgcccagcacctgaactcctggggggaccgtcagtcttcctcttccccccaaaacccaaggacaccctcatgatctcccggacccctgaggtcacatgcgtggtggtggacgtgagccacgaagaccctgaggtcaagttcaactggtacgtggacggcgtggaggtgcataatgccaagacaaagccgcgggaggagcagtacaacagcacgtaccgtgtggtcagcgtcctcaccgtcctgcaccaggactggctgaatggcaaggagtacaagtgcaaggtctccaacaaagccctcccagcccccatcgagaaaaccatctccaaagccaaagggcagccccgagaaccacaggtgtacaccctgcccccatcccgggaggagatgaccaagaaccaggtcagcctgacctgcctggtcaaaggcttctatcccagcgacatcgccgtggagtgggagagcaatgggcagccggagaacaactacaagaccacgcctcccgtgctggactccgacggctccttcttcctctacagcaagctcaccgtggacaagagcaggtggcagcaggggaacgtcttctcatgctccgtgatgcatgaggctctgcacaaccactacacgcagaagagcctctccctgtctccgggtaaatgataa

SEQ ID NO: 261 - protein, 507 aa, Artificial Sequence
  pSECTag2 C2 scFV-FC
METDTLLLWVLLLWVPGSTGDAAQPAEVQLVESGGGLVKPGGSLRLSCAASGFTFSGYAMSWVRQAPGKGLEWVSTISSGGTYIYYPDSVKGRFTISRDNAKNSLYLQMNSLRAEDTAVYYCARLGGDNYYEYFDVWGKGTTVTVSSGGGGSGGGGSGGGGSDIVLTQSPASLAVSPGQRATITCRASKSVSTSGYSYMHWYQQKPGQPPKLLIYLASNLESGVPARFSGSGSGTDFTLTINPVEANDTANYYCQHSRELPFTFGGGTKVEIKRTEPKSCDKTHTCPPCPAPELLGGPSVFLFPPKPKDTLMISRTPEVTCVVVDVSHEDPEVKFNWYVDGVEVHNAKTKPREEQYNSTYRVVSVLTVLHQDWLNGKEYKCKVSNKALPAPIEKTISKAKGQPREPQVYTLPPSREEMTKNQVSLTCLVKGFYPSDIAVEWESNGQPENNYKTTPPVLDSDGSFFLYSKLTVDKSRWQQGNVFSCSVMHEALHNHYTQKSLSLSPGK

SEQ ID NO: 262 - DNA, 487 bp, Artificial Sequence
  C2 scFV-FC 1 gBLOCk sequence
tgctctgggttccaggttccactggtgacgcggcccagccggccgaggtgcagctggtggagtctgggggaggcctggtcaagcctggggggtccctgagactctcctgtgcagcctctggattcaccttcagtggctatgccatgagctgggtccgccaggctccagggaaggggctggagtgggtctcaaccattagtagtggcggaacctacatatactaccccgactcagtgaagggccgattcaccatctccagagacaacgccaagaactcactgtatctgcaaatgaacagcctgagagccgaggacacggccgtgtattactgtgcgagacttgggggggataattactacgaatacttcgatgtctggggcaaagggaccacggtcaccgtctcctccggcggtggcggatccggcggtggcggatccggcggtggcggatccgacattgtgctgacccagtctccagcctccttggc

SEQ ID NO: 263 - DNA, 604 bp, Artificial Sequence
  C2 scFV-FC 2 gBLOCk sequence
cattgtgctgacccagtctccagcctccttggccgtgtctccaggacagagggccaccatcacctgcagagccagtaagagtgtcagtaccagcggatactcctacatgcactggtatcagcagaaaccaggacaacctcctaaactcctgatttacctggcatccaatctggagagcggggtcccagccaggttcagcggcagtgggtctgggaccgatttcaccctcacaattaatcctgtggaagctaatgatactgcaaattattactgtcagcacagtagggagctgcctttcacattcggcggagggaccaaggtggagatcaaacgaactgagcccaaatcttgtgacaaaactcacacatgcccaccgtgcccagcacctgaactcctggggggaccgtcagtcttcctcttccccccaaaacccaaggacaccctcatgatctcccggacccctgaggtcacatgcgtggtggtggacgtgagccacgaagaccctgaggtcaagttcaactggtacgtggacggcgtggaggtgcataatgccaagacaaagccgcgggaggagcagtacaacagcacgtaccgtgtggtcagc

SEQ ID NO: 264 - DNA, 1524 bp, Artificial Sequence
  pSECTag2 C3 scFV-FC
atggagacagacacactcctgctatgggtactgctgctctgggttccaggttccactggtgacgcggcccagccggcccaggttcagctggtgcagtctggagctgaggtgaagaagcctggggcctcagtgaaggtctcctgcaaggcttctggttacacctttaccgactacgccatgaactgggtgcgacaggcccctggacaagggcttgagtggatgggagtgatcagcaccttcagcggtaacacaaacttcaaccagaagttcaagggcagagtcaccatgaccacagacacatccacgagcacagcctacatggagctgaggagcctgagatctgacgacacggccgtgtattactgtgcgagaagcgactactacggcccatacttcgactactggggccagggcaccaccctgaccgtgtccagcggcggtggcggatccggcggtggcggatccggcggtggcggatccgatattgtgatgacccagactccactctctctgtccgtcacccctggacagccggcctccatctcctgcaggtctagtcagaccattgtccatagtaatggaaacacctatttggagtggtacctgcagaagccaggccagtctccacagctcctgatctataaggtttccaaccggttctctggagtgccagataggttcagtggcagcgggtcagggacagatttcacactgaaaatcagccgggtggaggctgaggatgttggggtttattactgcttccaaggtagccacgtgcctttcaccttcggcggagggaccaaggtggagatcaaacgaactgagcccaaatcttgtgacaaaactcacacatgcccaccgtgcccagcacctgaactcctggggggaccgtcagtcttcctcttccccccaaaacccaaggacaccctcatgatctcccggacccctgaggtcacatgcgtggtggtggacgtgagccacgaagaccctgaggtcaagttcaactggtacgtggacggcgtggaggtgcataatgccaagacaaagccgcgggaggagcagtacaacagcacgtaccgtgtggtcagcgtcctcaccgtcctgcaccaggactggctgaatggcaaggagtacaagtgcaaggtctccaacaaagccctcccagcccccatcgagaaaaccatctccaaagccaaagggcagccccgagaaccacaggtgtacaccctgcccccatcccgggaggagatgaccaagaaccaggtcagcctgacctgcctggtcaaaggcttctatcccagcgacatcgccgtggagtgggagagcaatgggcagccggagaacaactacaagaccacgcctcccgtgctggactccgacggctccttcttcctctacagcaagctcaccgtggacaagagcaggtggcagcaggggaacgtcttctcatgctccgtgatgcatgaggctctgcacaaccactacacgcagaagagcctctccctgtctccgggtaaatgataa

SEQ ID NO: 265 - protein, 506 aa, Artificial Sequence
  pSECTag2 C3 scFV-FC
METDTLLLWVLLLWVPGSTGDAAQPAQVQLVQSGAEVKKPGASVKVSCKASGYTFTDYAMNWVRQAPGQGLEWMGVISTFSGNTNFNQKFKGRVTMTTDTSTSTAYMELRSLRSDDTAVYYCARSDYYGPYFDYWGQGTTLTVSSGGGGSGGGGSGGGGSDIVMTQTPLSLSVTPGQPASISCRSSQTIVHSNGNTYLEWYLQKPGQSPQLLIYKVSNRFSGVPDRFSGSGSGTDFTLKISRVEAEDVGVYYCFQGSHVPFTFGGGTKVEIKRTEPKSCDKTHTCPPCPAPELLGGPSVFLFPPKPKDTLMISRTPEVTCVVVDVSHEDPEVKFNWYVDGVEVHNAKTKPREEQYNSTYRVVSVLTVLHQDWLNGKEYKCKVSNKALPAPIEKTISKAKGQPREPQVYTLPPSREEMTKNQVSLTCLVKGFYPSDIAVEWESNGQPENNYKTTPPVLDSDGSFFLYSKLTVDKSRWQQGNVFSCSVMHEALHNHYTQKSLSLSPGK

SEQ ID NO: 266 - DNA, 480 bp, Artificial Sequence
  C3 GS scFV FC 1 gBLOCk sequence
tgctctgggttccaggttccactggtgacgcggcccagccggcccaggttcagctggtgcagtctggagctgaggtgaagaagcctggggcctcagtgaaggtctcctgcaaggcttctggttacacctttaccgactacgccatgaactgggtgcgacaggcccctggacaagggcttgagtggatgggagtgatcagcaccttcagcggtaacacaaacttcaaccagaagttcaagggcagagtcaccatgaccacagacacatccacgagcacagcctacatggagctgaggagcctgagatctgacgacacggccgtgtattactgtgcgagaagcgactactacggcccatacttcgactactggggccagggcaccaccctgaccgtgtccagcggcggtggcggatccggcggtggcggatccggcggtggcggatccgatattgtgatgacccagactccactctctctgt

SEQ ID NO: 267 - DNA, 607 bp, Artificial Sequence
  C3 scFV FC2 gBLOCk sequence
tattgtgatgacccagactccactctctctgtccgtcacccctggacagccggcctccatctcctgcaggtctagtcagaccattgtccatagtaatggaaacacctatttggagtggtacctgcagaagccaggccagtctccacagctcctgatctataaggtttccaaccggttctctggagtgccagataggttcagtggcagcgggtcagggacagatttcacactgaaaatcagccgggtggaggctgaggatgttggggtttattactgcttccaaggtagccacgtgcctttcaccttcggcggagggaccaaggtggagatcaaacgaactgagcccaaatcttgtgacaaaactcacacatgcccaccgtgcccagcacctgaactcctggggggaccgtcagtcttcctcttccccccaaaacccaaggacaccctcatgatctcccggacccctgaggtcacatgcgtggtggtggacgtgagccacgaagaccctgaggtcaagttcaactggtacgtggacggcgtggaggtgcataatgccaagacaaagccgcgggaggagcagtacaacagcacgtaccgtgtggtcagc

SEQ ID NO: 268 - DNA, 1521 bp, Artificial Sequence
  pSECTag2 C8 scFV-FC
atggagacagacacactcctgctatgggtactgctgctctgggttccaggttccactggtgacgcggcccagccggccgaggtgcagctggtggagtctgggggaggcctggtcaagcctggggggtccctgagactctcctgtgcagcctctggattcaccttcagtggctatgccatgagctgggtccgccaggctccagggaaggggctggagtgggtctcaaccattagtagtggcggaacctacatatactaccctgactcagtgaagggccgattcaccatctccagagacaacgccaagaactcactgtatctgcaaatgaacagcctgagagccgaggacacggccgtgtattactgtgcgagactgggcggcgataactattatgaatattggggcaaagggaccacggtcaccgtctcctccggcggtggcggatccggcggtggcggatccggcggtggcggatccgacatcgtgatgacccagtctccagactccctggctgtgtctctgggcgagagggccaccatcaactgcagggccagcaagagtgttagcaccagcggctacagctacatgcactggtaccagcagaaaccaggacagcctcctaagctgctcatttacctggtgtctaacctggaatccggggtccctgaccgattcagtggcagcgggtctgggacagatttcactctcaccatcagcagcctgcaggctgaagatgtggcagtttattactgtcaacacattcgggaactgaccaggagtgaattcggcggagggaccaaggtggagatcaaacgaactgagcccaaatcttgtgacaaaactcacacatgcccaccgtgcccagcacctgaactcctggggggaccgtcagtcttcctcttccccccaaaacccaaggacaccctcatgatctcccggacccctgaggtcacatgcgtggtggtggacgtgagccacgaagaccctgaggtcaagttcaactggtacgtggacggcgtggaggtgcataatgccaagacaaagccgcgggaggagcagtacaacagcacgtaccgtgtggtcagcgtcctcaccgtcctgcaccaggactggctgaatggcaaggagtacaagtgcaaggtctccaacaaagccctcccagcccccatcgagaaaaccatctccaaagccaaagggcagccccgagaaccacaggtgtacaccctgcccccatcccgggaggagatgaccaagaaccaggtcagcctgacctgcctggtcaaaggcttctatcccagcgacatcgccgtggagtgggagagcaatgggcagccggagaacaactacaagaccacgcctcccgtgctggactccgacggctccttcttcctctacagcaagctcaccgtggacaagagcaggtggcagcaggggaacgtcttctcatgctccgtgatgcatgaggctctgcacaaccactacacgcagaagagcctctccctgtctccgggtaaatgataa

SEQ ID NO: 269 - protein, 505 aa, Artificial Sequence
  pSECTag2 C8 scFV-FC
METDTLLLWVLLLWVPGSTGDAAQPAEVQLVESGGGLVKPGGSLRLSCAASGFTFSGYAMSWVRQAPGKGLEWVSTISSGGTYIYYPDSVKGRFTISRDNAKNSLYLQMNSLRAEDTAVYYCARLGGDNYYEYWGKGTTVTVSSGGGGSGGGGSGGGGSDIVMTQSPDSLAVSLGERATINCRASKSVSTSGYSYMHWYQQKPGQPPKLLIYLVSNLESGVPDRFSGSGSGTDFTLTISSLQAEDVAVYYCQHIRELTRSEFGGGTKVEIKRTEPKSCDKTHTCPPCPAPELLGGPSVFLFPPKPKDTLMISRTPEVTCVVVDVSHEDPEVKFNWYVDGVEVHNAKTKPREEQYNSTYRVVSVLTVLHQDWLNGKEYKCKVSNKALPAPIEKTISKAKGQPREPQVYTLPPSREEMTKNQVSLTCLVKGFYPSDIAVEWESNGQPENNYKTTPPVLDSDGSFFLYSKLTVDKSRWQQGNVFSCSVMHEALHNHYTQKSLSLSPGK

SEQ ID NO: 270 - DNA, 477 bp, Artificial Sequence
  C8 scFV FC 1 gBLOCk sequence
tgctctgggttccaggttccactggtgacgcggcccagccggccgaggtgcagctggtggagtctgggggaggcctggtcaagcctggggggtccctgagactctcctgtgcagcctctggattcaccttcagtggctatgccatgagctgggtccgccaggctccagggaaggggctggagtgggtctcaaccattagtagtggcggaacctacatatactaccctgactcagtgaagggccgattcaccatctccagagacaacgccaagaactcactgtatctgcaaatgaacagcctgagagccgaggacacggccgtgtattactgtgcgagactgggcggcgataactattatgaatattggggcaaagggaccacggtcaccgtctcctccggcggtggcggatccggcggtggcggatccggcggtggcggatccgacatcgtgatgacccagtctccagactccctgg

SEQ ID NO: 271 - DNA, 607 bp, Artificial Sequence
  C8 scFV FC2 gBLOCk sequence
catcgtgatgacccagtctccagactccctggctgtgtctctgggcgagagggccaccatcaactgcagggccagcaagagtgttagcaccagcggctacagctacatgcactggtaccagcagaaaccaggacagcctcctaagctgctcatttacctggtgtctaacctggaatccggggtccctgaccgattcagtggcagcgggtctgggacagatttcactctcaccatcagcagcctgcaggctgaagatgtggcagtttattactgtcaacacattcgggaactgaccaggagtgaattcggcggagggaccaaggtggagatcaaacgaactgagcccaaatcttgtgacaaaactcacacatgcccaccgtgcccagcacctgaactcctggggggaccgtcagtcttcctcttccccccaaaacccaaggacaccctcatgatctcccggacccctgaggtcacatgcgtggtggtggacgtgagccacgaagaccctgaggtcaagttcaactggtacgtggacggcgtggaggtgcataatgccaagacaaagccgcgggaggagcagtacaacagcacgtaccgtgtggtcagc

SEQ ID NO: 272 - DNA, 702 bp, Artificial Sequence
  Human IgG1 Fc sequence
gagcccaaatcttgtgacaaaactcacacatgcccaccgtgcccagcacctgaactcctggggggaccgtcagtcttcctcttccccccaaaacccaaggacaccctcatgatctcccggacccctgaggtcacatgcgtggtggtggacgtgagccacgaagaccctgaggtcaagttcaactggtacgtggacggcgtggaggtgcataatgccaagacaaagccgcgggaggagcagtacaacagcacgtaccgtgtggtcagcgtcctcaccgtcctgcaccaggactggctgaatggcaaggagtacaagtgcaaggtctccaacaaagccctcccagcccccatcgagaaaaccatctccaaagccaaagggcagccccgagaaccacaggtgtacaccctgcccccatcccgggaggagatgaccaagaaccaggtcagcctgacctgcctggtcaaaggcttctatcccagcgacatcgccgtggagtgggagagcaatgggcagccggagaacaactacaagaccacgcctcccgtgctggactccgacggctccttcttcctctacagcaagctcaccgtggacaagagcaggtggcagcaggggaacgtcttctcatgctccgtgatgcatgaggctctgcacaaccactacacgcagaagagcctctccctgtctccgggtaaatgataa

SEQ ID NO: 273 - protein, 232 aa, Artificial Sequence
  Human IgG1 Fc sequence
EPKSCDKTHTCPPCPAPELLGGPSVFLFPPKPKDTLMISRTPEVTCVVVDVSHEDPEVKFNWYVDGVEVHNAKTKPREEQYNSTYRVVSVLTVLHQDWLNGKEYKCKVSNKALPAPIEKTISKAKGQPREPQVYTLPPSREEMTKNQVSLTCLVKGFYPSDIAVEWESNGQPENNYKTTPPVLDSDGSFFLYSKLTVDKSRWQQGNVFSCSVMHEALHNHYTQKSLSLSPGK

SEQ ID NO: 274 - DNA, 666 bp, Artificial Sequence
  Human IgG1 CH2-CH3 domain sequence
ccgtgcccagcacctgaactcctggggggaccgtcagtcttcctcttccccccaaaacccaaggacaccctcatgatctcccggacccctgaggtcacatgcgtggtggtggacgtgagccacgaagaccctgaggtcaagttcaactggtacgtggacggcgtggaggtgcataatgccaagacaaagccgcgggaggagcagtacaacagcacgtaccgtgtggtcagcgtcctcaccgtcctgcaccaggactggctgaatggcaaggagtacaagtgcaaggtctccaacaaagccctcccagcccccatcgagaaaaccatctccaaagccaaagggcagccccgagaaccacaggtgtacaccctgcccccatcccgggaggagatgaccaagaaccaggtcagcctgacctgcctggtcaaaggcttctatcccagcgacatcgccgtggagtgggagagcaatgggcagccggagaacaactacaagaccacgcctcccgtgctggactccgacggctccttcttcctctacagcaagctcaccgtggacaagagcaggtggcagcaggggaacgtcttctcatgctccgtgatgcatgaggctctgcacaaccactacacgcagaagagcctctccctgtctccgggtaaatgataa

SEQ ID NO: 275 - protein, 220 aa, Artificial Sequence
  Human IgG1 CH2-CH3 domain sequence
PCPAPELLGGPSVFLFPPKPKDTLMISRTPEVTCVVVDVSHEDPEVKFNWYVDGVEVHNAKTKPREEQYNSTYRVVSVLTVLHQDWLNGKEYKCKVSNKALPAPIEKTISKAKGQPREPQVYTLPPSREEMTKNQVSLTCLVKGFYPSDIAVEWESNGQPENNYKTTPPVLDSDGSFFLYSKLTVDKSRWQQGNVFSCSVMHEALHNHYTQKSLSLSPGK

SEQ ID NO: 276 - DNA, 327 bp, Artificial Sequence
  Human IgG1 CH3 domain sequence
gggcagccccgagaaccacaggtgtacaccctgcccccatcccgggaggagatgaccaagaaccaggtcagcctgacctgcctggtcaaaggcttctatcccagcgacatcgccgtggagtgggagagcaatgggcagccggagaacaactacaagaccacgcctcccgtgctggactccgacggctccttcttcctctacagcaagctcaccgtggacaagagcaggtggcagcaggggaacgtcttctcatgctccgtgatgcatgaggctctgcacaaccactacacgcagaagagcctctccctgtctccgggtaaatgataa

SEQ ID NO: 277 - protein, 107 aa, Artificial Sequence
  Human IgG1 CH3 domain sequence
GQPREPQVYTLPPSREEMTKNQVSLTCLVKGFYPSDIAVEWESNGQPENNYKTTPPVLDSDGSFFLYSKLTVDKSRWQQGNVFSCSVMHEALHNHYTQKSLSLSPGK

SEQ ID NO: 278 - DNA, 702 bp, Artificial Sequence
  Human IgG1 Fc Y407R sequence
gagcccaaatcttgtgacaaaactcacacatgcccaccgtgcccagcacctgaactcctggggggaccgtcagtcttcctcttccccccaaaacccaaggacaccctcatgatctcccggacccctgaggtcacatgcgtggtggtggacgtgagccacgaagaccctgaggtcaagttcaactggtacgtggacggcgtggaggtgcataatgccaagacaaagccgcgggaggagcagtacaacagcacgtaccgtgtggtcagcgtcctcaccgtcctgcaccaggactggctgaatggcaaggagtacaagtgcaaggtctccaacaaagccctcccagcccccatcgagaaaaccatctccaaagccaaagggcagccccgagaaccacaggtgtacaccctgcccccatcccgggaggagatgaccaagaaccaggtcagcctgacctgcctggtcaaaggcttctatcccagcgacatcgccgtggagtgggagagcaatgggcagccggagaacaactacaagaccacgcctcccgtgctggactccgacggctccttcttcctcaggagcaagctcaccgtggacaagagcaggtggcagcaggggaacgtcttctcatgctccgtgatgcatgaggctctgcacaaccactacacgcagaagagcctctccctgtctccgggtaaatgataa

SEQ ID NO: 279 - protein, 232 aa, Artificial Sequence
  Human IgG1 Fc Y407R sequence
EPKSCDKTHTCPPCPAPELLGGPSVFLFPPKPKDTLMISRTPEVTCVVVDVSHEDPEVKFNWYVDGVEVHNAKTKPREEQYNSTYRVVSVLTVLHQDWLNGKEYKCKVSNKALPAPIEKTISKAKGQPREPQVYTLPPSREEMTKNQVSLTCLVKGFYPSDIAVEWESNGQPENNYKTTPPVLDSDGSFFLRSKLTVDKSRWQQGNVFSCSVMHEALHNHYTQKSLSLSPGK

SEQ ID NO: 280 - DNA, 702 bp, Artificial Sequence
  Human IgG1 Fc F405Q sequence
gagcccaaatcttgtgacaaaactcacacatgcccaccgtgcccagcacctgaactcctggggggaccgtcagtcttcctcttccccccaaaacccaaggacaccctcatgatctcccggacccctgaggtcacatgcgtggtggtggacgtgagccacgaagaccctgaggtcaagttcaactggtacgtggacggcgtggaggtgcataatgccaagacaaagccgcgggaggagcagtacaacagcacgtaccgtgtggtcagcgtcctcaccgtcctgcaccaggactggctgaatggcaaggagtacaagtgcaaggtctccaacaaagccctcccagcccccatcgagaaaaccatctccaaagccaaagggcagccccgagaaccacaggtgtacaccctgcccccatcccgggaggagatgaccaagaaccaggtcagcctgacctgcctggtcaaaggcttctatcccagcgacatcgccgtggagtgggagagcaatgggcagccggagaacaactacaagaccacgcctcccgtgctggactccgacggctccttccagctctacagcaagctcaccgtggacaagagcaggtggcagcaggggaacgtcttctcatgctccgtgatgcatgaggctctgcacaaccactacacgcagaagagcctctccctgtctccgggtaaatgataa

SEQ ID NO: 281 - protein, 232 aa, Artificial Sequence
  Human IgG1 Fc F405Q sequence
EPKSCDKTHTCPPCPAPELLGGPSVFLFPPKPKDTLMISRTPEVTCVVVDVSHEDPEVKFNWYVDGVEVHNAKTKPREEQYNSTYRVVSVLTVLHQDWLNGKEYKCKVSNKALPAPIEKTISKAKGQPREPQVYTLPPSREEMTKNQVSLTCLVKGFYPSDIAVEWESNGQPENNYKTTPPVLDSDGSFQLYSKLTVDKSRWQQGNVFSCSVMHEALHNHYTQKSLSLSPGK

SEQ ID NO: 282 - DNA, 702 bp, Artificial Sequence
  Human IgG1 Fc T394D sequence
gagcccaaatcttgtgacaaaactcacacatgcccaccgtgcccagcacctgaactcctggggggaccgtcagtcttcctcttccccccaaaacccaaggacaccctcatgatctcccggacccctgaggtcacatgcgtggtggtggacgtgagccacgaagaccctgaggtcaagttcaactggtacgtggacggcgtggaggtgcataatgccaagacaaagccgcgggaggagcagtacaacagcacgtaccgtgtggtcagcgtcctcaccgtcctgcaccaggactggctgaatggcaaggagtacaagtgcaaggtctccaacaaagccctcccagcccccatcgagaaaaccatctccaaagccaaagggcagccccgagaaccacaggtgtacaccctgcccccatcccgggaggagatgaccaagaaccaggtcagcctgacctgcctggtcaaaggcttctatcccagcgacatcgccgtggagtgggagagcaatgggcagccggagaacaactacaagaccgaccctcccgtgctggactccgacggctccttcttcctctacagcaagctcaccgtggacaagagcaggtggcagcaggggaacgtcttctcatgctccgtgatgcatgaggctctgcacaaccactacacgcagaagagcctctccctgtctccgggtaaatgataa

SEQ ID NO: 283 - protein, 232 aa, Artificial Sequence
  Human IgG1 Fc T394D sequence
EPKSCDKTHTCPPCPAPELLGGPSVFLFPPKPKDTLMISRTPEVTCVVVDVSHEDPEVKFNWYVDGVEVHNAKTKPREEQYNSTYRVVSVLTVLHQDWLNGKEYKCKVSNKALPAPIEKTISKAKGQPREPQVYTLPPSREEMTKNQVSLTCLVKGFYPSDIAVEWESNGQPENNYKTDPPVLDSDGSFFLYSKLTVDKSRWQQGNVFSCSVMHEALHNHYTQKSLSLSPGK

SEQ ID NO: 284 - DNA, 702 bp, Artificial Sequence
  Human IgG1 Fc T366W/L368W sequence
gagcccaaatcttgtgacaaaactcacacatgcccaccgtgcccagcacctgaactcctggggggaccgtcagtcttcctcttccccccaaaacccaaggacaccctcatgatctcccggacccctgaggtcacatgcgtggtggtggacgtgagccacgaagaccctgaggtcaagttcaactggtacgtggacggcgtggaggtgcataatgccaagacaaagccgcgggaggagcagtacaacagcacgtaccgtgtggtcagcgtcctcaccgtcctgcaccaggactggctgaatggcaaggagtacaagtgcaaggtctccaacaaagccctcccagcccccatcgagaaaaccatctccaaagccaaagggcagccccgagaaccacaggtgtacaccctgcccccatcccgggaggagatgaccaagaaccaggtcagcctgtggtgctgggtcaaaggcttctatcccagcgacatcgccgtggagtgggagagcaatgggcagccggagaacaactacaagaccacgcctcccgtgctggactccgacggctccttcttcctctacagcaagctcaccgtggacaagagcaggtggcagcaggggaacgtcttctcatgctccgtgatgcatgaggctctgcacaaccactacacgcagaagagcctctccctgtctccgggtaaatgataa

SEQ ID NO: 285 - protein, 232 aa, Artificial Sequence
  Human IgG1 Fc T366W/L368W sequence
EPKSCDKTHTCPPCPAPELLGGPSVFLFPPKPKDTLMISRTPEVTCVVVDVSHEDPEVKFNWYVDGVEVHNAKTKPREEQYNSTYRVVSVLTVLHQDWLNGKEYKCKVSNKALPAPIEKTISKAKGQPREPQVYTLPPSREEMTKNQVSLWCWVKGFYPSDIAVEWESNGQPENNYKTTPPVLDSDGSFFLYSKLTVDKSRWQQGNVFSCSVMHEALHNHYTQKSLSLSPGK

SEQ ID NO: 286 - DNA, 702 bp, Artificial Sequence
  Human IgG1 Fc T364R/L368R sequence
gagcccaaatcttgtgacaaaactcacacatgcccaccgtgcccagcacctgaactcctggggggaccgtcagtcttcctcttccccccaaaacccaaggacaccctcatgatctcccggacccctgaggtcacatgcgtggtggtggacgtgagccacgaagaccctgaggtcaagttcaactggtacgtggacggcgtggaggtgcataatgccaagacaaagccgcgggaggagcagtacaacagcacgtaccgtgtggtcagcgtcctcaccgtcctgcaccaggactggctgaatggcaaggagtacaagtgcaaggtctccaacaaagccctcccagcccccatcgagaaaaccatctccaaagccaaagggcagccccgagaaccacaggtgtacaccctgcccccatcccgggaggagatgaccaagaaccaggtcaggctgacctgcagggtcaaaggcttctatcccagcgacatcgccgtggagtgggagagcaatgggcagccggagaacaactacaagaccacgcctcccgtgctggactccgacggctccttcttcctctacagcaagctcaccgtggacaagagcaggtggcagcaggggaacgtcttctcatgctccgtgatgcatgaggctctgcacaaccactacacgcagaagagcctctccctgtctccgggtaaatgataa

SEQ ID NO: 287 - protein, 232 aa, Artificial Sequence
  Human IgG1 Fc T364R/L368R sequence
EPKSCDKTHTCPPCPAPELLGGPSVFLFPPKPKDTLMISRTPEVTCVVVDVSHEDPEVKFNWYVDGVEVHNAKTKPREEQYNSTYRVVSVLTVLHQDWLNGKEYKCKVSNKALPAPIEKTISKAKGQPREPQVYTLPPSREEMTKNQVRLTCRVKGFYPSDIAVEWESNGQPENNYKTTPPVLDSDGSFFLYSKLTVDKSRWQQGNVFSCSVMHEALHNHYTQKSLSLSPGK

SEQ ID NO: 288 - DNA, 657 bp, Artificial Sequence
  Human IgG1 Fc hingeless sequence
gcacctgaactcctggggggaccgtcagtcttcctcttccccccaaaacccaaggacaccctcatgatctcccggacccctgaggtcacatgcgtggtggtggacgtgagccacgaagaccctgaggtcaagttcaactggtacgtggacggcgtggaggtgcataatgccaagacaaagccgcgggaggagcagtacaacagcacgtaccgtgtggtcagcgtcctcaccgtcctgcaccaggactggctgaatggcaaggagtacaagtgcaaggtctccaacaaagccctcccagcccccatcgagaaaaccatctccaaagccaaagggcagccccgagaaccacaggtgtacaccctgcccccatcccgggaggagatgaccaagaaccaggtcagcctgacctgcctggtcaaaggcttctatcccagcgacatcgccgtggagtgggagagcaatgggcagccggagaacaactacaagaccacgcctcccgtgctggactccgacggctccttcttcctctacagcaagctcaccgtggacaagagcaggtggcagcaggggaacgtcttctcatgctccgtgatgcatgaggctctgcacaaccactacacgcagaagagcctctccctgtctccgggtaaatgataa

SEQ ID NO: 289 - protein, 217 aa, Artificial Sequence
  Human IgG1 Fc hingeless sequence
APELLGGPSVFLFPPKPKDTLMISRTPEVTCVVVDVSHEDPEVKFNWYVDGVEVHNAKTKPREEQYNSTYRVVSVLTVLHQDWLNGKEYKCKVSNKALPAPIEKTISKAKGQPREPQVYTLPPSREEMTKNQVSLTCLVKGFYPSDIAVEWESNGQPENNYKTTPPVLDSDGSFFLYSKLTVDKSRWQQGNVFSCSVMHEALHNHYTQKSLSLSPGK

SEQ ID NO: 290 - DNA, 696 bp, Artificial Sequence
  Human IgG1 G237A FC sequence
gagcccaaatcttgtgacaaaactcacacatgcccaccgtgcccagcacctgaactcctgggggccccgtcagtcttcctcttccccccaaaacccaaggacaccctcatgatctcccggacccctgaggtcacatgcgtggtggtggacgtgagccacgaagaccctgaggtcaagttcaactggtacgtggacggcgtggaggtgcataatgccaagacaaagccgcgggaggagcagtacaacagcacgtaccgtgtggtcagcgtcctcaccgtcctgcaccaggactggctgaatggcaaggagtacaagtgcaaggtctccaacaaagccctcccagcccccatcgagaaaaccatctccaaagccaaagggcagccccgagaaccacaggtgtacaccctgcccccatcccgggaggagatgaccaagaaccaggtcagcctgacctgcctggtcaaaggcttctatcccagcgacatcgccgtggagtgggagagcaatgggcagccggagaacaactacaagaccacgcctcccgtgctggactccgacggctccttcttcctctacagcaagctcaccgtggacaagagcaggtggcagcaggggaacgtcttctcatgctccgtgatgcatgaggctctgcacaaccactacacgcagaagagcctctccctgtctccgggtaaa

SEQ ID NO: 291 - protein, 232 aa, Artificial Sequence
  Human IgG1 G237A FC sequence
EPKSCDKTHTCPPCPAPELLGAPSVFLFPPKPKDTLMISRTPEVTCVVVDVSHEDPEVKFNWYVDGVEVHNAKTKPREEQYNSTYRVVSVLTVLHQDWLNGKEYKCKVSNKALPAPIEKTISKAKGQPREPQVYTLPPSREEMTKNQVSLTCLVKGFYPSDIAVEWESNGQPENNYKTTPPVLDSDGSFFLYSKLTVDKSRWQQGNVFSCSVMHEALHNHYTQKSLSLSPGK

SEQ ID NO: 292 - DNA, 696 bp, Artificial Sequence
  Human IgG1 L234A/L235A FC sequence
gagcccaaatcttgtgacaaaactcacacatgcccaccgtgcccagcacctgaagccgccgggggaccgtcagtcttcctcttccccccaaaacccaaggacaccctcatgatctcccggacccctgaggtcacatgcgtggtggtggacgtgagccacgaagaccctgaggtcaagttcaactggtacgtggacggcgtggaggtgcataatgccaagacaaagccgcgggaggagcagtacaacagcacgtaccgtgtggtcagcgtcctcaccgtcctgcaccaggactggctgaatggcaaggagtacaagtgcaaggtctccaacaaagccctcccagcccccatcgagaaaaccatctccaaagccaaagggcagccccgagaaccacaggtgtacaccctgcccccatcccgggaggagatgaccaagaaccaggtcagcctgacctgcctggtcaaaggcttctatcccagcgacatcgccgtggagtgggagagcaatgggcagccggagaacaactacaagaccacgcctcccgtgctggactccgacggctccttcttcctctacagcaagctcaccgtggacaagagcaggtggcagcaggggaacgtcttctcatgctccgtgatgcatgaggctctgcacaaccactacacgcagaagagcctctccctgtctccgggtaaa

SEQ ID NO: 293 - protein, 232 aa, Artificial Sequence
  Human IgG1 L234A/L235A FC sequence
EPKSCDKTHTCPPCPAPEAAGGPSVFLFPPKPKDTLMISRTPEVTCVVVDVSHEDPEVKFNWYVDGVEVHNAKTKPREEQYNSTYRVVSVLTVLHQDWLNGKEYKCKVSNKALPAPIEKTISKAKGQPREPQVYTLPPSREEMTKNQVSLTCLVKGFYPSDIAVEWESNGQPENNYKTTPPVLDSDGSFFLYSKLTVDKSRWQQGNVFSCSVMHEALHNHYTQKSLSLSPGK

SEQ ID NO: 294 - DNA, 1341 bp, Artificial Sequence
  CAR-T E6 CD3z sequence
atggccctgcccgtgaccgctttgctgctccccctggcgctgctgctgcacgccgccaggccagaggtccagctggttgagagtggcggtgggctggttaagcctggcggctccctgcggctgagctgcgccgcgagtggatttactttcagccgatatgggatgagttgggtgcggcaagctcccgggaagaggctggaatgggtctcaacaatctccggggggggcacttacatctattaccccgactcagtcaaggggagatttaccatttcacgagacaacgctaagaataccctgtatttgcagatgaattctctgagagcagaggacacagctgtttactattgtacccgcgacaactatggcaggaactacgactacggtatggactattggggacaagggacattggttacagtgagcagtggcggcgggggcagcggaggaggaggcagcggtggggggggcagcgagatagtgctcacgcagtcacccgcgactctcagtctctcacctggggaacgagctaccctgacgtgctctgctacctcctcagtgtcatatattcactggtatcagcaacggcccgggcagtcccctagattgctcatttatagtacctctaatctggcctcaggtatccctgcacgattttctggatctggttcaggttctgattacaccctcactatctctagcctggagcctgaagactttgccgtttattactgccagcagaggtctagctccccattcacctttgggagtgggaccaaggttgaaattaaaacgacaaccccggcccccagaccaccaacgccagcccccaccatcgccagccaacccctgtctctgagaccagaagcctgtaggcctgccgccggtggagctgtgcacacaagaggactggatttcgcctgtgatatctacatttgggccccgctcgcaggcacatgtggagtgctcctcctctccctggtgattaccctgtactgccgcgttaagttctcccgatcagccgacgcgcctgcttacaagcagggccagaaccaactgtacaacgagctgaatctcggtagacgggaagagtacgacgtgttggacaaacggagaggccgcgacccagaaatgggcggcaagcctcgcaggaaaaacccccaggagggactgtacaatgagttgcagaaagataagatggcagaagcttatagcgagatcggaatgaagggggaaaggagacgagggaaaggacacgacggcctttatcagggcctgtccacagcaacaaaagatacgtatgacgccctccatatgcaggcacttccaccacggtgataa

SEQ ID NO: 295 - protein, 445 aa, Artificial Sequence
  CAR-T E6 CD3z sequence
MALPVTALLLPLALLLHAARPEVQLVESGGGLVKPGGSLRLSCAASGFTFSRYGMSWVRQAPGKRLEWVSTISGGGTYIYYPDSVKGRFTISRDNAKNTLYLQMNSLRAEDTAVYYCTRDNYGRNYDYGMDYWGQGTLVTVSSGGGGSGGGGSGGGGSEIVLTQSPATLSLSPGERATLTCSATSSVSYIHWYQQRPGQSPRLLIYSTSNLASGIPARFSGSGSGSDYTLTISSLEPEDFAVYYCQQRSSSPFTFGSGTKVEIKTTTPAPRPPTPAPTIASQPLSLRPEACRPAAGGAVHTRGLDFACDIYIWAPLAGTCGVLLLSLVITLYCRVKFSRSADAPAYKQGQNQLYNELNLGRREEYDVLDKRRGRDPEMGGKPRRKNPQEGLYNELQKDKMAEAYSEIGMKGERRRGKGHDGLYQGLSTATKDTYDALHMQALPPR

SEQ ID NO: 296 - DNA, 485 bp, Artificial Sequence
  CAR-T E6 CD3z gBLOCK sequence
tggagctgtgcacacaagaggactggatttcgcctgtgatatctacatttgggccccgctcgcaggcacatgtggagtgctcctcctctccctggtgattaccctgtactgccgcgttaagttctcccgatcagccgacgcgcctgcttacaagcagggccagaaccaactgtacaacgagctgaatctcggtagacgggaagagtacgacgtgttggacaaacggagaggccgcgacccagaaatgggcggcaagcctcgcaggaaaaacccccaggagggactgtacaatgagttgcagaaagataagatggcagaagcttatagcgagatcggaatgaagggggaaaggagacgagggaaaggacacgacggcctttatcagggcctgtccacagcaacaaaagatacgtatgacgccctccatatgcaggcacttccaccacggtgataagtttaaacccgctgatcagcctcgactgtgc

SEQ ID NO: 297 - DNA, 1464 bp, Artificial Sequence
  CAR-T E6 CD28/CD3z sequence
atggccctgcccgtgaccgctttgctgctccccctggcgctgctgctgcacgccgccaggccagaggtccagctggttgagagtggcggtgggctggttaagcctggcggctccctgcggctgagctgcgccgcgagtggatttactttcagccgatatgggatgagttgggtgcggcaagctcccgggaagaggctggaatgggtctcaacaatctccggggggggcacttacatctattaccccgactcagtcaaggggagatttaccatttcacgagacaacgctaagaataccctgtatttgcagatgaattctctgagagcagaggacacagctgtttactattgtacccgcgacaactatggcaggaactacgactacggtatggactattggggacaagggacattggttacagtgagcagtggcggcgggggcagcggaggaggaggcagcggtggggggggcagcgagatagtgctcacgcagtcacccgcgactctcagtctctcacctggggaacgagctaccctgacgtgctctgctacctcctcagtgtcatatattcactggtatcagcaacggcccgggcagtcccctagattgctcatttatagtacctctaatctggcctcaggtatccctgcacgattttctggatctggttcaggttctgattacaccctcactatctctagcctggagcctgaagactttgccgtttattactgccagcagaggtctagctccccattcacctttgggagtgggaccaaggttgaaattaaaacgacaaccccggcccccagaccaccaacgccagcccccaccatcgccagccaacccctgtctctgagaccagaagcctgtaggcctgccgccggtggagctgtgcacacaagaggactggatttcgcctgtgatatctacatttgggccccgctcgcaggcacatgtggagtgctcctcctctccctggtgattaccctgtactgcagaagcaagcggtctcggctcctgcattctgattacatgaacatgaccccaagaagaccaggccccaccaggaaacattaccagccctacgctccgccacgcgacttcgctgcctaccggtcccgcgttaagttctcccgatcagccgacgcgcctgcttacaagcagggccagaaccaactgtacaacgagctgaatctcggtagacgggaagagtacgacgtgttggacaaacggagaggccgcgacccagaaatgggcggcaagcctcgcaggaaaaacccccaggagggactgtacaatgagttgcagaaagataagatggcagaagcttatagcgagatcggaatgaagggggaaaggagacgagggaaaggacacgacggcctttatcagggcctgtccacagcaacaaaagatacgtatgacgccctccatatgcaggcacttccaccacggtgataa

SEQ ID NO: 298 - protein, 486 aa, Artificial Sequence
  CAR-T E6 CD28/CD3z sequence
MALPVTALLLPLALLLHAARPEVQLVESGGGLVKPGGSLRLSCAASGFTFSRYGMSWVRQAPGKRLEWVSTISGGGTYIYYPDSVKGRFTISRDNAKNTLYLQMNSLRAEDTAVYYCTRDNYGRNYDYGMDYWGQGTLVTVSSGGGGSGGGGSGGGGSEIVLTQSPATLSLSPGERATLTCSATSSVSYIHWYQQRPGQSPRLLIYSTSNLASGIPARFSGSGSGSDYTLTISSLEPEDFAVYYCQQRSSSPFTFGSGTKVEIKTTTPAPRPPTPAPTIASQPLSLRPEACRPAAGGAVHTRGLDFACDIYIWAPLAGTCGVLLLSLVITLYCRSKRSRLLHSDYMNMTPRRPGPTRKHYQPYAPPRDFAAYRSRVKFSRSADAPAYKQGQNQLYNELNLGRREEYDVLDKRRGRDPEMGGKPRRKNPQEGLYNELQKDKMAEAYSEIGMKGERRRGKGHDGLYQGLSTATKDTYDALHMQALPPR

SEQ ID NO: 299 - DNA, 608 bp, Artificial Sequence
  CAR-T E6 CD28/CD3z g BLOCK sequence
tggagctgtgcacacaagaggactggatttcgcctgtgatatctacatttgggccccgctcgcaggcacatgtggagtgctcctcctctccctggtgattaccctgtactgcagaagcaagcggtctcggctcctgcattctgattacatgaacatgaccccaagaagaccaggccccaccaggaaacattaccagccctacgctccgccacgcgacttcgctgcctaccggtcccgcgttaagttctcccgatcagccgacgcgcctgcttacaagcagggccagaaccaactgtacaacgagctgaatctcggtagacgggaagagtacgacgtgttggacaaacggagaggccgcgacccagaaatgggcggcaagcctcgcaggaaaaacccccaggagggactgtacaatgagttgcagaaagataagatggcagaagcttatagcgagatcggaatgaagggggaaaggagacgagggaaaggacacgacggcctttatcagggcctgtccacagcaacaaaagatacgtatgacgccctccatatgcaggcacttccaccacggtgataagtttaaacccgctgatcagcctcgactgtgc

SEQ ID NO: 300 - DNA, 1467 bp, Artificial Sequence
  CAR-T E6 4-1BB/CD3z sequence
atggccctgcccgtgaccgctttgctgctccccctggcgctgctgctgcacgccgccaggccagaggtccagctggttgagagtggcggtgggctggttaagcctggcggctccctgcggctgagctgcgccgcgagtggatttactttcagccgatatgggatgagttgggtgcggcaagctcccgggaagaggctggaatgggtctcaacaatctccggggggggcacttacatctattaccccgactcagtcaaggggagatttaccatttcacgagacaacgctaagaataccctgtatttgcagatgaattctctgagagcagaggacacagctgtttactattgtacccgcgacaactatggcaggaactacgactacggtatggactattggggacaagggacattggttacagtgagcagtggcggcgggggcagcggaggaggaggcagcggtggggggggcagcgagatagtgctcacgcagtcacccgcgactctcagtctctcacctggggaacgagctaccctgacgtgctctgctacctcctcagtgtcatatattcactggtatcagcaacggcccgggcagtcccctagattgctcatttatagtacctctaatctggcctcaggtatccctgcacgattttctggatctggttcaggttctgattacaccctcactatctctagcctggagcctgaagactttgccgtttattactgccagcagaggtctagctccccattcacctttgggagtgggaccaaggttgaaattaaaacgacaaccccggcccccagaccaccaacgccagcccccaccatcgccagccaacccctgtctctgagaccagaagcctgtaggcctgccgccggtggagctgtgcacacaagaggactggatttcgcctgtgatatctacatttgggccccgctcgcaggcacatgtggagtgctcctcctctccctggtgattaccctgtactgcaaaaggggccgcaaaaaactcctttacatttttaagcagccttttatgaggccagtacagacgactcaagaggaagacgggtgctcatgccgctttcctgaggaggaggaaggagggtgcgaactgcgcgttaagttctcccgatcagccgacgcgcctgcttacaagcagggccagaaccaactgtacaacgagctgaatctcggtagacgggaagagtacgacgtgttggacaaacggagaggccgcgacccagaaatgggcggcaagcctcgcaggaaaaacccccaggagggactgtacaatgagttgcagaaagataagatggcagaagcttatagcgagatcggaatgaagggggaaaggagacgagggaaaggacacgacggcctttatcagggcctgtccacagcaacaaaagatacgtatgacgccctccatatgcaggcacttccaccacggtgataa

SEQ ID NO: 301 - protein, 487 aa, Artificial Sequence
  CAR-T E6 4-1BB/CD3z sequence
MALPVTALLLPLALLLHAARPEVQLVESGGGLVKPGGSLRLSCAASGFTFSRYGMSWVRQAPGKRLEWVSTISGGGTYIYYPDSVKGRFTISRDNAKNTLYLQMNSLRAEDTAVYYCTRDNYGRNYDYGMDYWGQGTLVTVSSGGGGSGGGGSGGGGSEIVLTQSPATLSLSPGERATLTCSATSSVSYIHWYQQRPGQSPRLLIYSTSNLASGIPARFSGSGSGSDYTLTISSLEPEDFAVYYCQQRSSSPFTFGSGTKVEIKTTTPAPRPPTPAPTIASQPLSLRPEACRPAAGGAVHTRGLDFACDIYIWAPLAGTCGVLLLSLVITLYCKRGRKKLLYIFKQPFMRPVQTTQEEDGCSCRFPEEEEGGCELRVKFSRSADAPAYKQGQNQLYNELNLGRREEYDVLDKRRGRDPEMGGKPRRKNPQEGLYNELQKDKMAEAYSEIGMKGERRRGKGHDGLYQGLSTATKDTYDALHMQALPPR

SEQ ID NO: 302 - DNA, 611 bp, Artificial Sequence
  CAR-T E6 4-1BB/CD3z gBLOCK sequence
tggagctgtgcacacaagaggactggatttcgcctgtgatatctacatttgggccccgctcgcaggcacatgtggagtgctcctcctctccctggtgattaccctgtactgcaaaaggggccgcaaaaaactcctttacatttttaagcagccttttatgaggccagtacagacgactcaagaggaagacgggtgctcatgccgctttcctgaggaggaggaaggagggtgcgaactgcgcgttaagttctcccgatcagccgacgcgcctgcttacaagcagggccagaaccaactgtacaacgagctgaatctcggtagacgggaagagtacgacgtgttggacaaacggagaggccgcgacccagaaatgggcggcaagcctcgcaggaaaaacccccaggagggactgtacaatgagttgcagaaagataagatggcagaagcttatagcgagatcggaatgaagggggaaaggagacgagggaaaggacacgacggcctttatcagggcctgtccacagcaacaaaagatacgtatgacgccctccatatgcaggcacttccaccacggtgataagtttaaacccgctgatcagcctcgactgtgc

SEQ ID NO: 303 - DNA, 1590 bp, Artificial Sequence
  CAR-T E6 CD28/4-1BB/CD3z sequence
atggccctgcccgtgaccgctttgctgctccccctggcgctgctgctgcacgccgccaggccagaggtccagctggttgagagtggcggtgggctggttaagcctggcggctccctgcggctgagctgcgccgcgagtggatttactttcagccgatatgggatgagttgggtgcggcaagctcccgggaagaggctggaatgggtctcaacaatctccggggggggcacttacatctattaccccgactcagtcaaggggagatttaccatttcacgagacaacgctaagaataccctgtatttgcagatgaattctctgagagcagaggacacagctgtttactattgtacccgcgacaactatggcaggaactacgactacggtatggactattggggacaagggacattggttacagtgagcagtggcggcgggggcagcggaggaggaggcagcggtggggggggcagcgagatagtgctcacgcagtcacccgcgactctcagtctctcacctggggaacgagctaccctgacgtgctctgctacctcctcagtgtcatatattcactggtatcagcaacggcccgggcagtcccctagattgctcatttatagtacctctaatctggcctcaggtatccctgcacgattttctggatctggttcaggttctgattacaccctcactatctctagcctggagcctgaagactttgccgtttattactgccagcagaggtctagctccccattcacctttgggagtgggaccaaggttgaaattaaaacgacaaccccggcccccagaccaccaacgccagcccccaccatcgccagccaacccctgtctctgagaccagaagcctgtaggcctgccgccggtggagctgtgcacacaagaggactggatttcgcctgtgatatctacatttgggccccgctcgcaggcacatgtggagtgctcctcctctccctggtgattaccctgtactgcagaagcaagcggtctcggctcctgcattctgattacatgaacatgaccccaagaagaccaggccccaccaggaaacattaccagccctacgctccgccacgcgacttcgctgcctaccggtccaaaaggggccgcaaaaaactcctttacatttttaagcagccttttatgaggccagtacagacgactcaagaggaagacgggtgctcatgccgctttcctgaggaggaggaaggagggtgcgaactgcgcgttaagttctcccgatcagccgacgcgcctgcttacaagcagggccagaaccaactgtacaacgagctgaatctcggtagacgggaagagtacgacgtgttggacaaacggagaggccgcgacccagaaatgggcggcaagcctcgcaggaaaaacccccaggagggactgtacaatgagttgcagaaagataagatggcagaagcttatagcgagatcggaatgaagggggaaaggagacgagggaaaggacacgacggcctttatcagggcctgtccacagcaacaaaagatacgtatgacgccctccatatgcaggcacttccaccacggtgataa

SEQ ID NO: 304 - protein, 528 aa, Artificial Sequence
  CAR-T E6 CD28/4-1BB/CD3z sequence
MALPVTALLLPLALLLHAARPEVQLVESGGGLVKPGGSLRLSCAASGFTFSRYGMSWVRQAPGKRLEWVSTISGGGTYIYYPDSVKGRFTISRDNAKNTLYLQMNSLRAEDTAVYYCTRDNYGRNYDYGMDYWGQGTLVTVSSGGGGSGGGGSGGGGSEIVLTQSPATLSLSPGERATLTCSATSSVSYIHWYQQRPGQSPRLLIYSTSNLASGIPARFSGSGSGSDYTLTISSLEPEDFAVYYCQQRSSSPFTFGSGTKVEIKTTTPAPRPPTPAPTIASQPLSLRPEACRPAAGGAVHTRGLDFACDIYIWAPLAGTCGVLLLSLVITLYCRSKRSRLLHSDYMNMTPRRPGPTRKHYQPYAPPRDFAAYRSKRGRKKLLYIFKQPFMRPVQTTQEEDGCSCRFPEEEEGGCELRVKFSRSADAPAYKQGQNQLYNELNLGRREEYDVLDKRRGRDPEMGGKPRRKNPQEGLYNELQKDKMAEAYSEIGMKGERRRGKGHDGLYQGLSTATKDTYDALHMQALPPR

SEQ ID NO: 305 - DNA, 1668 bp, Artificial Sequence
  CAR-T E6 CD28/4-1BB/CD3z gBLOCK sequence
atagggagacccaagctggctagttaagcttggtaccgagggccaccatggccctgcccgtgaccgctttgctgctccccctggcgctgctgctgcacgccgccaggccagaggtccagctggttgagagtggcggtgggctggttaagcctggcggctccctgcggctgagctgcgccgcgagtggatttactttcagccgatatgggatgagttgggtgcggcaagctcccgggaagaggctggaatgggtctcaacaatctccggggggggcacttacatctattaccccgactcagtcaaggggagatttaccatttcacgagacaacgctaagaataccctgtatttgcagatgaattctctgagagcagaggacacagctgtttactattgtacccgcgacaactatggcaggaactacgactacggtatggactattggggacaagggacattggttacagtgagcagtggcggcgggggcagcggaggaggaggcagcggtggggggggcagcgagatagtgctcacgcagtcacccgcgactctcagtctctcacctggggaacgagctaccctgacgtgctctgctacctcctcagtgtcatatattcactggtatcagcaacggcccgggcagtcccctagattgctcatttatagtacctctaatctggcctcaggtatccctgcacgattttctggatctggttcaggttctgattacaccctcactatctctagcctggagcctgaagactttgccgtttattactgccagcagaggtctagctccccattcacctttgggagtgggaccaaggttgaaattaaaacgacaaccccggcccccagaccaccaacgccagcccccaccatcgccagccaacccctgtctctgagaccagaagcctgtaggcctgccgccggtggagctgtgcacacaagaggactggatttcgcctgtgatatctacatttgggccccgctcgcaggcacatgtggagtgctcctcctctccctggtgattaccctgtactgcagaagcaagcggtctcggctcctgcattctgattacatgaacatgaccccaagaagaccaggccccaccaggaaacattaccagccctacgctccgccacgcgacttcgctgcctaccggtccaaaaggggccgcaaaaaactcctttacatttttaagcagccttttatgaggccagtacagacgactcaagaggaagacgggtgctcatgccgctttcctgaggaggaggaaggagggtgcgaactgcgcgttaagttctcccgatcagccgacgcgcctgcttacaagcagggccagaaccaactgtacaacgagctgaatctcggtagacgggaagagtacgacgtgttggacaaacggagaggccgcgacccagaaatgggcggcaagcctcgcaggaaaaacccccaggagggactgtacaatgagttgcagaaagataagatggcagaagcttatagcgagatcggaatgaagggggaaaggagacgagggaaaggacacgacggcctttatcagggcctgtccacagcaacaaaagatacgtatgacgccctccatatgcaggcacttccaccacggtgataagtttaaacccgctgatcagcctcgactgtgc

SEQ ID NO: 306 - DNA, 1608 bp, Artificial Sequence
  CAR-T C2 CD28/4-1BB/CD3z sequence
atggccttgccagtgacggccctgctgctgccattggctcttctgttgcacgctgccaggcctgaagtgcagctcgtagagagtggcgggggactggtgaagcccggtggaagcctcagactcagttgcgccgcctcaggtttcactttttcaggttacgccatgtcctgggtaagacaggcaccggggaaaggactcgagtgggtgtctactatcagctcaggaggcacttatatatattatcctgactctgtaaaaggccgatttacgatttctcgcgacaatgcaaagaactccctctacctccaaatgaacagtcttagggcagaagacactgctgtatactattgtgcacgcctcggcggcgacaactactacgagtactttgacgtgtgggggaaagggactaccgtgacagtttcaagcggaggaggtggctcaggtggaggcgggtcaggggggggaggaagtgatattgtgctcacacaatccccagcctccctggctgtgtctcccggccaacgcgctacaattacatgtcgggcctccaaaagcgtgagcaccagcggctacagctacatgcactggtatcaacagaaaccaggacaaccccccaaactgttgatttatctcgcttcaaacttggagtccggcgtgcctgcgcgcttttcagggagtgggagcggcacagattttacgctgactatcaaccccgtagaagcaaacgatacagcgaattattattgtcaacattcccgggaactcccctttacgttcggcgggggcacaaaggtcgaaattaagagaaccacgacaaccccggcccccagaccaccaacgccagcccccaccatcgccagccaacccctgtctctgagaccagaagcctgtaggcctgccgccggtggagctgtgcacacaagaggactggatttcgcctgtgatatctacatttgggccccgctcgcaggcacatgtggagtgctcctcctctccctggtgattaccctgtactgcagaagcaagcggtctcggctcctgcattctgattacatgaacatgaccccaagaagaccaggccccaccaggaaacattaccagccctacgctccgccacgcgacttcgctgcctaccggtccaaaaggggccgcaaaaaactcctttacatttttaagcagccttttatgaggccagtacagacgactcaagaggaagacgggtgctcatgccgctttcctgaggaggaggaaggagggtgcgaactgcgcgttaagttctcccgatcagccgacgcgcctgcttacaagcagggccagaaccaactgtacaacgagctgaatctcggtagacgggaagagtacgacgtgttggacaaacggagaggccgcgacccagaaatgggcggcaagcctcgcaggaaaaacccccaggagggactgtacaatgagttgcagaaagataagatggcagaagcttatagcgagatcggaatgaagggggaaaggagacgagggaaaggacacgacggcctttatcagggcctgtccacagcaacaaaagatacgtatgacgccctccatatgcaggcacttccaccacggtgataa

SEQ ID NO: 307 - protein, 513 aa, Artificial Sequence
  CAR-T C2 CD28/4-1BB/CD3z sequence
EVQLVESGGGLVKPGGSLRLSCAASGFTFSGYAMSWVRQAPGKGLEWVSTISSGGTYIYYPDSVKGRFTISRDNAKNSLYLQMNSLRAEDTAVYYCARLGGDNYYEYFDVWGKGTTVTVSSGGGGSGGGGSGGGGSDIVLTQSPASLAVSPGQRATITCRASKSVSTSGYSYMHWYQQKPGQPPKLLIYLASNLESGVPARFSGSGSGTDFTLTINPVEANDTANYYCQHSRELPFTFGGGTKVEIKRTTTTPAPRPPTPAPTIASQPLSLRPEACRPAAGGAVHTRGLDFACDIYIWAPLAGTCGVLLLSLVITLYCRSKRSRLLHSDYMNMTPRRPGPTRKHYQPYAPPRDFAAYRSKRGRKKLLYIFKQPFMRPVQTTQEEDGCSCRFPEEEEGGCELRVKFSRSADAPAYKQGQNQLYNELNLGRREEYDVLDKRRGRDPEMGGKPRRKNPQEGLYNELQKDKMAEAYSEIGMKGERRRGKGHDGLYQGLSTATKDTYDALHMQALPPR

SEQ ID NO: 308 - DNA, 553 bp, Artificial Sequence
  CAR-T C2-1 gBLOCK sequence
atagggagacccaagctggctagttaagcttggtaccgagggccaccatggccttgccagtgacggccctgctgctgccattggctcttctgttgcacgctgccaggcctgaagtgcagctcgtagagagtggcgggggactggtgaagcccggtggaagcctcagactcagttgcgccgcctcaggtttcactttttcaggttacgccatgtcctgggtaagacaggcaccggggaaaggactcgagtgggtgtctactatcagctcaggaggcacttatatatattatcctgactctgtaaaaggccgatttacgatttctcgcgacaatgcaaagaactccctctacctccaaatgaacagtcttagggcagaagacactgctgtatactattgtgcacgcctcggcggcgacaactactacgagtactttgacgtgtgggggaaagggactaccgtgacagtttcaagcggaggaggtggctcaggtggaggcgggtcaggggggggaggaagtgatattgtgctcacacaatccccagcctccctggc

SEQ ID NO: 309 - DNA, 518 bp, Artificial Sequence
  CAR-T C2-2 gBLOCK sequence
aagtgatattgtgctcacacaatccccagcctccctggctgtgtctcccggccaacgcgctacaattacatgtcgggcctccaaaagcgtgagcaccagcggctacagctacatgcactggtatcaacagaaaccaggacaaccccccaaactgttgatttatctcgcttcaaacttggagtccggcgtgcctgcgcgcttttcagggagtgggagcggcacagattttacgctgactatcaaccccgtagaagcaaacgatacagcgaattattattgtcaacattcccgggaactcccctttacgttcggcgggggcacaaaggtcgaaattaagagaaccacgacaaccccggcccccagaccaccaacgccagcccccaccatcgccagccaacccctgtctctgagaccagaagcctgtaggcctgccgccggtggagctgtgcacacaagaggactggatttcgcctgtgatatctacatttgggccccgctcgcaggcacatgtggagtgc

SEQ ID NO: 310 - DNA, 2028 bp, Artificial Sequence
  CAR E6 Fc/8/4-1BB/CD3z sequence
atggccctgcccgtgaccgctttgctgctccccctggcgctgctgctgcacgccgccaggccagaggtccagctggttgagagtggcggtgggctggttaagcctggcggctccctgcggctgagctgcgccgcgagtggatttactttcagccgatatgggatgagttgggtgcggcaagctcccgggaagaggctggaatgggtctcaacaatctccggggggggcacttacatctattaccccgactcagtcaaggggagatttaccatttcacgagacaacgctaagaataccctgtatttgcagatgaattctctgagagcagaggacacagctgtttactattgtacccgcgacaactatggcaggaactacgactacggtatggactattggggacaagggacattggttacagtgagcagtggcggcgggggcagcggaggaggaggcagcggtggcggaggcagcgagatagtgctcacgcagtcacccgcgactctcagtctctcacctggggaacgagctaccctgacgtgctctgctacctcctcagtgtcatatattcactggtatcagcaacggcccgggcagtcccctagattgctcatttatagtacctctaatctggcctcaggtatccctgcacgattttctggatctggttcaggttctgattacaccctcactatctctagcctggagcctgaagactttgccgtttattactgccagcagaggtctagctccccattcacctttgggagtgggaccaaggttgaaattaaagagcccaaatcttgtgacaaaactcacacatgcccaccgtgcccagcacctgaactcctggggggaccgtcagtcttcctcttccccccaaaacccaaggacaccctcatgatctcccggacccctgaggtcacatgcgtggtggtggacgtgagccacgaagaccctgaggtcaagttcaactggtacgtggacggcgtggaggtgcataatgccaagacaaagccgcgggaggagcagtacaacagcacgtaccgtgtggtcagcgtcctcaccgtcctgcaccaggactggctgaatggcaaggagtacaagtgcaaggtctccaacaaagccctcccagcccccatcgagaaaaccatctccaaagccaaagggcagccccgagaaccacaggtgtacaccctgcccccatcccgggaggagatgaccaagaaccaggtcagcctgacctgcctggtcaaaggcttctatcccagcgacatcgccgtggagtgggagagcaatgggcagccggagaacaactacaagaccacgcctcccgtgctggactccgacggctccttcttcctctacagcaagctcaccgtggacaagagcaggtggcagcaggggaacgtcttctcatgctccgtgatgcatgaggctctgcacaaccactacacgcagaagagcctctccctgtctccgggtaaaatctacatttgggccccgctcgcaggcacatgtggagtgctcctcctctccctggtgattaccctgtactgcaaaaggggccgcaaaaaactcctttacatttttaagcagccttttatgaggccagtacagacgactcaagaggaagacgggtgctcatgccgctttcctgaggaggaggaaggagggtgcgaactgcgcgttaagttctcccgatcagccgacgcgcctgcttacaagcagggccagaaccaactgtacaacgagctgaatctcggtagacgggaagagtacgacgtgttggacaaacggagaggccgcgacccagaaatgggcggcaagcctcgcaggaaaaacccccaggagggactgtacaatgagttgcagaaagataagatggcagaagcttatagcgagatcggaatgaagggggaaaggagacgagggaaaggacacgacggcctttatcagggcctgtccacagcaacaaaagatacgtatgacgccctccatatgcaggcacttccaccacggtgataa

SEQ ID NO: 311 - protein, 674 aa, Artificial Sequence
  CAR E6 Fc/8/4-1BB/CD3z sequence
MALPVTALLLPLALLLHAARPEVQLVESGGGLVKPGGSLRLSCAASGFTFSRYGMSWVRQAPGKRLEWVSTISGGGTYIYYPDSVKGRFTISRDNAKNTLYLQMNSLRAEDTAVYYCTRDNYGRNYDYGMDYWGQGTLVTVSSGGGGSGGGGSGGGGSEIVLTQSPATLSLSPGERATLTCSATSSVSYIHWYQQRPGQSPRLLIYSTSNLASGIPARFSGSGSGSDYTLTISSLEPEDFAVYYCQQRSSSPFTFGSGTKVEIKEPKSCDKTHTCPPCPAPELLGGPSVFLFPPKPKDTLMISRTPEVTCVVVDVSHEDPEVKFNWYVDGVEVHNAKTKPREEQYNSTYRVVSVLTVLHQDWLNGKEYKCKVSNKALPAPIEKTISKAKGQPREPQVYTLPPSREEMTKNQVSLTCLVKGFYPSDIAVEWESNGQPENNYKTTPPVLDSDGSFFLYSKLTVDKSRWQQGNVFSCSVMHEALHNHYTQKSLSLSPGKIYIWAPLAGTCGVLLLSLVITLYCKRGRKKLLYIFKQPFMRPVQTTQEEDGCSCRFPEEEEGGCELRVKFSRSADAPAYKQGQNQLYNELNLGRREEYDVLDKRRGRDPEMGGKPRRKNPQEGLYNELQKDKMAEAYSEIGMKGERRRGKGHDGLYQGLSTATKDTYDALHMQALPPR

SEQ ID NO: 312 - DNA, 714 bp, Artificial Sequence
  E6 CAR pCDH gBLOCK sequence
acgctgttttgacctccatagaagattctagagctagctgtagagcttggtaccgagggccaccatggccctgcccgtgaccgctttgctgctccccctggcgctgctgctgcacgccgccaggccagaggtccagctggttgagagtggcggtgggctggttaagcctggcggctccctgcggctgagctgcgccgcgagtggatttactttcagccgatatgggatgagttgggtgcggcaagctcccgggaagaggctggaatgggtctcaacaatctccggggggggcacttacatctattaccccgactcagtcaaggggagatttaccatttcacgagacaacgctaagaataccctgtatttgcagatgaattctctgagagcagaggacacagctgtttactattgtacccgcgacaactatggcaggaactacgactacggtatggactattggggacaagggacattggttacagtgagcagtggcggcgggggcagcggaggaggaggcagcggtggcggaggcagcgagatagtgctcacgcagtcacccgcgactctcagtctctcacctggggaacgagctaccctgacgtgctctgctacctcctcagtgtcatatattcactggtatcagcaacggcccgggcagtcccctagattgctcatttatagtacctctaatctggcctcaggtatccctgc

SEQ ID NO: 313 - DNA, 723 bp, Artificial Sequence
  E6 CAR Fc pCDH gBLOCK sequence
agtacctctaatctggcctcaggtatccctgcacgattttctggatctggttcaggttctgattacaccctcactatctctagcctggagcctgaagactttgccgtttattactgccagcagaggtctagctccccattcacctttgggagtgggaccaaggttgaaattaaagagcccaaatcttgtgacaaaactcacacatgcccaccgtgcccagcacctgaactcctggggggaccgtcagtcttcctcttccccccaaaacccaaggacaccctcatgatctcccggacccctgaggtcacatgcgtggtggtggacgtgagccacgaagaccctgaggtcaagttcaactggtacgtggacggcgtggaggtgcataatgccaagacaaagccgcgggaggagcagtacaacagcacgtaccgtgtggtcagcgtcctcaccgtcctgcaccaggactggctgaatggcaaggagtacaagtgcaaggtctccaacaaagccctcccagcccccatcgagaaaaccatctccaaagccaaagggcagccccgagaaccacaggtgtacaccctgcccccatcccgggaggagatgaccaagaaccaggtcagcctgacctgcctggtcaaaggcttctatcccagcgacatcgccgtggagtgggagagcaatgggcagccggagaacaactacaagaccacgcctcccgtgctg

SEQ ID NO: 314 - DNA, 778 bp, Artificial Sequence
  E6 CAR 8BB3 pCDH gBLOCK sequence
agaacaactacaagaccacgcctcccgtgctggactccgacggctccttcttcctctacagcaagctcaccgtggacaagagcaggtggcagcaggggaacgtcttctcatgctccgtgatgcatgaggctctgcacaaccactacacgcagaagagcctctccctgtctccgggtaaaatctacatttgggccccgctcgcaggcacatgtggagtgctcctcctctccctggtgattaccctgtactgcaaaaggggccgcaaaaaactcctttacatttttaagcagccttttatgaggccagtacagacgactcaagaggaagacgggtgctcatgccgctttcctgaggaggaggaaggagggtgcgaactgcgcgttaagttctcccgatcagccgacgcgcctgcttacaagcagggccagaaccaactgtacaacgagctgaatctcggtagacgggaagagtacgacgtgttggacaaacggagaggccgcgacccagaaatgggcggcaagcctcgcaggaaaaacccccaggagggactgtacaatgagttgcagaaagataagatggcagaagcttatagcgagatcggaatgaagggggaaaggagacgagggaaaggacacgacggcctttatcagggcctgtccacagcaacaaaagatacgtatgacgccctccatatgcaggcacttccaccacggtgataagtttaaacccgctgatcaggcggccgcgaaggatctgcgatcgctccggtgcccgtcag

SEQ ID NO: 315 - DNA, 1983 bp, Artificial Sequence
  CAR E6 FcH/8/4-1BB/CD3z sequence
atggccctgcccgtgaccgctttgctgctccccctggcgctgctgctgcacgccgccaggccagaggtccagctggttgagagtggcggtgggctggttaagcctggcggctccctgcggctgagctgcgccgcgagtggatttactttcagccgatatgggatgagttgggtgcggcaagctcccgggaagaggctggaatgggtctcaacaatctccggggggggcacttacatctattaccccgactcagtcaaggggagatttaccatttcacgagacaacgctaagaataccctgtatttgcagatgaattctctgagagcagaggacacagctgtttactattgtacccgcgacaactatggcaggaactacgactacggtatggactattggggacaagggacattggttacagtgagcagtggcggcgggggcagcggaggaggaggcagcggtggcggaggcagcgagatagtgctcacgcagtcacccgcgactctcagtctctcacctggggaacgagctaccctgacgtgctctgctacctcctcagtgtcatatattcactggtatcagcaacggcccgggcagtcccctagattgctcatttatagtacctctaatctggcctcaggtatccctgcacgattttctggatctggttcaggttctgattacaccctcactatctctagcctggagcctgaagactttgccgtttattactgccagcagaggtctagctccccattcacctttgggagtgggaccaaggttgaaattaaagcacctgaactcctggggggaccgtcagtcttcctcttccccccaaaacccaaggacaccctcatgatctcccggacccctgaggtcacatgcgtggtggtggacgtgagccacgaagaccctgaggtcaagttcaactggtacgtggacggcgtggaggtgcataatgccaagacaaagccgcgggaggagcagtacaacagcacgtaccgtgtggtcagcgtcctcaccgtcctgcaccaggactggctgaatggcaaggagtacaagtgcaaggtctccaacaaagccctcccagcccccatcgagaaaaccatctccaaagccaaagggcagccccgagaaccacaggtgtacaccctgcccccatcccgggaggagatgaccaagaaccaggtcagcctgacctgcctggtcaaaggcttctatcccagcgacatcgccgtggagtgggagagcaatgggcagccggagaacaactacaagaccacgcctcccgtgctggactccgacggctccttcttcctctacagcaagctcaccgtggacaagagcaggtggcagcaggggaacgtcttctcatgctccgtgatgcatgaggctctgcacaaccactacacgcagaagagcctctccctgtctccgggtaaaatctacatttgggccccgctcgcaggcacatgtggagtgctcctcctctccctggtgattaccctgtactgcaaaaggggccgcaaaaaactcctttacatttttaagcagccttttatgaggccagtacagacgactcaagaggaagacgggtgctcatgccgctttcctgaggaggaggaaggagggtgcgaactgcgcgttaagttctcccgatcagccgacgcgcctgcttacaagcagggccagaaccaactgtacaacgagctgaatctcggtagacgggaagagtacgacgtgttggacaaacggagaggccgcgacccagaaatgggcggcaagcctcgcaggaaaaacccccaggagggactgtacaatgagttgcagaaagataagatggcagaagcttatagcgagatcggaatgaagggggaaaggagacgagggaaaggacacgacggcctttatcagggcctgtccacagcaacaaaagatacgtatgacgccctccatatgcaggcacttccaccacggtgataa

SEQ ID NO: 316 - protein, 659 aa, Artificial Sequence
  CAR E6 FcH/8/4-1BB/CD3z sequence
MALPVTALLLPLALLLHAARPEVQLVESGGGLVKPGGSLRLSCAASGFTFSRYGMSWVRQAPGKRLEWVSTISGGGTYIYYPDSVKGRFTISRDNAKNTLYLQMNSLRAEDTAVYYCTRDNYGRNYDYGMDYWGQGTLVTVSSGGGGSGGGGSGGGGSEIVLTQSPATLSLSPGERATLTCSATSSVSYIHWYQQRPGQSPRLLIYSTSNLASGIPARFSGSGSGSDYTLTISSLEPEDFAVYYCQQRSSSPFTFGSGTKVEIKAPELLGGPSVFLFPPKPKDTLMISRTPEVTCVVVDVSHEDPEVKFNWYVDGVEVHNAKTKPREEQYNSTYRVVSVLTVLHQDWLNGKEYKCKVSNKALPAPIEKTISKAKGQPREPQVYTLPPSREEMTKNQVSLTCLVKGFYPSDIAVEWESNGQPENNYKTTPPVLDSDGSFFLYSKLTVDKSRWQQGNVFSCSVMHEALHNHYTQKSLSLSPGKIYIWAPLAGTCGVLLLSLVITLYCKRGRKKLLYIFKQPFMRPVQTTQEEDGCSCRFPEEEEGGCELRVKFSRSADAPAYKQGQNQLYNELNLGRREEYDVLDKRRGRDPEMGGKPRRKNPQEGLYNELQKDKMAEAYSEIGMKGERRRGKGHDGLYQGLSTATKDTYDALHMQALPPR

SEQ ID NO: 317 - DNA, 678 bp, Artificial Sequence
  E6 CAR FcH pCDH gBLOCK sequence
agtacctctaatctggcctcaggtatccctgcacgattttctggatctggttcaggttctgattacaccctcactatctctagcctggagcctgaagactttgccgtttattactgccagcagaggtctagctccccattcacctttgggagtgggaccaaggttgaaattaaagcacctgaactcctggggggaccgtcagtcttcctcttccccccaaaacccaaggacaccctcatgatctcccggacccctgaggtcacatgcgtggtggtggacgtgagccacgaagaccctgaggtcaagttcaactggtacgtggacggcgtggaggtgcataatgccaagacaaagccgcgggaggagcagtacaacagcacgtaccgtgtggtcagcgtcctcaccgtcctgcaccaggactggctgaatggcaaggagtacaagtgcaaggtctccaacaaagccctcccagcccccatcgagaaaaccatctccaaagccaaagggcagccccgagaaccacaggtgtacaccctgcccccatcccgggaggagatgaccaagaaccaggtcagcctgacctgcctggtcaaaggcttctatcccagcgacatcgccgtggagtgggagagcaatgggcagccggagaacaactacaagaccacgcctcccgtgctg

SEQ ID NO: 318 - DNA, 2022 bp, Artificial Sequence
  CAR E6 Fc/4/4-1BB/CD3z sequence
atggccctgcccgtgaccgctttgctgctccccctggcgctgctgctgcacgccgccaggccagaggtccagctggttgagagtggcggtgggctggttaagcctggcggctccctgcggctgagctgcgccgcgagtggatttactttcagccgatatgggatgagttgggtgcggcaagctcccgggaagaggctggaatgggtctcaacaatctccggggggggcacttacatctattaccccgactcagtcaaggggagatttaccatttcacgagacaacgctaagaataccctgtatttgcagatgaattctctgagagcagaggacacagctgtttactattgtacccgcgacaactatggcaggaactacgactacggtatggactattggggacaagggacattggttacagtgagcagtggcggcgggggcagcggaggaggaggcagcggtggcggaggcagcgagatagtgctcacgcagtcacccgcgactctcagtctctcacctggggaacgagctaccctgacgtgctctgctacctcctcagtgtcatatattcactggtatcagcaacggcccgggcagtcccctagattgctcatttatagtacctctaatctggcctcaggtatccctgcacgattttctggatctggttcaggttctgattacaccctcactatctctagcctggagcctgaagactttgccgtttattactgccagcagaggtctagctccccattcacctttgggagtgggaccaaggttgaaattaaagagcccaaatcttgtgacaaaactcacacatgcccaccgtgcccagcacctgaactcctggggggaccgtcagtcttcctcttccccccaaaacccaaggacaccctcatgatctcccggacccctgaggtcacatgcgtggtggtggacgtgagccacgaagaccctgaggtcaagttcaactggtacgtggacggcgtggaggtgcataatgccaagacaaagccgcgggaggagcagtacaacagcacgtaccgtgtggtcagcgtcctcaccgtcctgcaccaggactggctgaatggcaaggagtacaagtgcaaggtctccaacaaagccctcccagcccccatcgagaaaaccatctccaaagccaaagggcagccccgagaaccacaggtgtacaccctgcccccatcccgggaggagatgaccaagaaccaggtcagcctgacctgcctggtcaaaggcttctatcccagcgacatcgccgtggagtgggagagcaatgggcagccggagaacaactacaagaccacgcctcccgtgctggactccgacggctccttcttcctctacagcaagctcaccgtggacaagagcaggtggcagcaggggaacgtcttctcatgctccgtgatgcatgaggctctgcacaaccactacacgcagaagagcctctccctgtctccgggtaaaatggccctgattgtgctggggggcgtcgccggcctcctgcttttcattgggctaggcatcttcttcaaaaggggccgcaaaaaactcctttacatttttaagcagccttttatgaggccagtacagacgactcaagaggaagacgggtgctcatgccgctttcctgaggaggaggaaggagggtgcgaactgcgcgttaagttctcccgatcagccgacgcgcctgcttacaagcagggccagaaccaactgtacaacgagctgaatctcggtagacgggaagagtacgacgtgttggacaaacggagaggccgcgacccagaaatgggcggcaagcctcgcaggaaaaacccccaggagggactgtacaatgagttgcagaaagataagatggcagaagcttatagcgagatcggaatgaagggggaaaggagacgagggaaaggacacgacggcctttatcagggcctgtccacagcaacaaaagatacgtatgacgccctccatatgcaggcacttccaccacggtgataa

SEQ ID NO: 319 - protein, 672 aa, Artificial Sequence
  CAR E6 Fc/4/4-1BB/CD3z sequence
MALPVTALLLPLALLLHAARPEVQLVESGGGLVKPGGSLRLSCAASGFTFSRYGMSWVRQAPGKRLEWVSTISGGGTYIYYPDSVKGRFTISRDNAKNTLYLQMNSLRAEDTAVYYCTRDNYGRNYDYGMDYWGQGTLVTVSSGGGGSGGGGSGGGGSEIVLTQSPATLSLSPGERATLTCSATSSVSYIHWYQQRPGQSPRLLIYSTSNLASGIPARFSGSGSGSDYTLTISSLEPEDFAVYYCQQRSSSPFTFGSGTKVEIKEPKSCDKTHTCPPCPAPELLGGPSVFLFPPKPKDTLMISRTPEVTCVVVDVSHEDPEVKFNWYVDGVEVHNAKTKPREEQYNSTYRVVSVLTVLHQDWLNGKEYKCKVSNKALPAPIEKTISKAKGQPREPQVYTLPPSREEMTKNQVSLTCLVKGFYPSDIAVEWESNGQPENNYKTTPPVLDSDGSFFLYSKLTVDKSRWQQGNVFSCSVMHEALHNHYTQKSLSLSPGKMALIVLGGVAGLLLFIGLGIFFKRGRKKLLYIFKQPFMRPVQTTQEEDGCSCRFPEEEEGGCELRVKFSRSADAPAYKQGQNQLYNELNLGRREEYDVLDKRRGRDPEMGGKPRRKNPQEGLYNELQKDKMAEAYSEIGMKGERRRGKGHDGLYQGLSTATKDTYDALHMQALPPR

SEQ ID NO: 320 - DNA, 772 bp, Artificial Sequence
  E6 CAR 44BB3 pCDH gBLOCK sequence
agaacaactacaagaccacgcctcccgtgctggactccgacggctccttcttcctctacagcaagctcaccgtggacaagagcaggtggcagcaggggaacgtcttctcatgctccgtgatgcatgaggctctgcacaaccactacacgcagaagagcctctccctgtctccgggtaaaatggccctgattgtgctggggggcgtcgccggcctcctgcttttcattgggctaggcatcttcttcaaaaggggccgcaaaaaactcctttacatttttaagcagccttttatgaggccagtacagacgactcaagaggaagacgggtgctcatgccgctttcctgaggaggaggaaggagggtgcgaactgcgcgttaagttctcccgatcagccgacgcgcctgcttacaagcagggccagaaccaactgtacaacgagctgaatctcggtagacgggaagagtacgacgtgttggacaaacggagaggccgcgacccagaaatgggcggcaagcctcgcaggaaaaacccccaggagggactgtacaatgagttgcagaaagataagatggcagaagcttatagcgagatcggaatgaagggggaaaggagacgagggaaaggacacgacggcctttatcagggcctgtccacagcaacaaaagatacgtatgacgccctccatatgcaggcacttccaccacggtgataagtttaaacccgctgatcaggcggccgcgaaggatctgcgatcgctccggtgcccgtcag

SEQ ID NO: 321 - DNA, 1977 bp, Artificial Sequence
  CAR E6 FcH/4/4-1BB/CD3z sequence
atggccctgcccgtgaccgctttgctgctccccctggcgctgctgctgcacgccgccaggccagaggtccagctggttgagagtggcggtgggctggttaagcctggcggctccctgcggctgagctgcgccgcgagtggatttactttcagccgatatgggatgagttgggtgcggcaagctcccgggaagaggctggaatgggtctcaacaatctccggggggggcacttacatctattaccccgactcagtcaaggggagatttaccatttcacgagacaacgctaagaataccctgtatttgcagatgaattctctgagagcagaggacacagctgtttactattgtacccgcgacaactatggcaggaactacgactacggtatggactattggggacaagggacattggttacagtgagcagtggcggcgggggcagcggaggaggaggcagcggtggcggaggcagcgagatagtgctcacgcagtcacccgcgactctcagtctctcacctggggaacgagctaccctgacgtgctctgctacctcctcagtgtcatatattcactggtatcagcaacggcccgggcagtcccctagattgctcatttatagtacctctaatctggcctcaggtatccctgcacgattttctggatctggttcaggttctgattacaccctcactatctctagcctggagcctgaagactttgccgtttattactgccagcagaggtctagctccccattcacctttgggagtgggaccaaggttgaaattaaagcacctgaactcctggggggaccgtcagtcttcctcttccccccaaaacccaaggacaccctcatgatctcccggacccctgaggtcacatgcgtggtggtggacgtgagccacgaagaccctgaggtcaagttcaactggtacgtggacggcgtggaggtgcataatgccaagacaaagccgcgggaggagcagtacaacagcacgtaccgtgtggtcagcgtcctcaccgtcctgcaccaggactggctgaatggcaaggagtacaagtgcaaggtctccaacaaagccctcccagcccccatcgagaaaaccatctccaaagccaaagggcagccccgagaaccacaggtgtacaccctgcccccatcccgggaggagatgaccaagaaccaggtcagcctgacctgcctggtcaaaggcttctatcccagcgacatcgccgtggagtgggagagcaatgggcagccggagaacaactacaagaccacgcctcccgtgctggactccgacggctccttcttcctctacagcaagctcaccgtggacaagagcaggtggcagcaggggaacgtcttctcatgctccgtgatgcatgaggctctgcacaaccactacacgcagaagagcctctccctgtctccgggtaaaatggccctgattgtgctggggggcgtcgccggcctcctgcttttcattgggctaggcatcttcttcaaaaggggccgcaaaaaactcctttacatttttaagcagccttttatgaggccagtacagacgactcaagaggaagacgggtgctcatgccgctttcctgaggaggaggaaggagggtgcgaactgcgcgttaagttctcccgatcagccgacgcgcctgcttacaagcagggccagaaccaactgtacaacgagctgaatctcggtagacgggaagagtacgacgtgttggacaaacggagaggccgcgacccagaaatgggcggcaagcctcgcaggaaaaacccccaggagggactgtacaatgagttgcagaaagataagatggcagaagcttatagcgagatcggaatgaagggggaaaggagacgagggaaaggacacgacggcctttatcagggcctgtccacagcaacaaaagatacgtatgacgccctccatatgcaggcacttccaccacggtgataa

SEQ ID NO: 322 - protein, 657 aa, Artificial Sequence
  CAR E6 FcH/4/4-1BB/CD3z sequence
MALPVTALLLPLALLLHAARPEVQLVESGGGLVKPGGSLRLSCAASGFTFSRYGMSWVRQAPGKRLEWVSTISGGGTYIYYPDSVKGRFTISRDNAKNTLYLQMNSLRAEDTAVYYCTRDNYGRNYDYGMDYWGQGTLVTVSSGGGGSGGGGSGGGGSEIVLTQSPATLSLSPGERATLTCSATSSVSYIHWYQQRPGQSPRLLIYSTSNLASGIPARFSGSGSGSDYTLTISSLEPEDFAVYYCQQRSSSPFTFGSGTKVEIKAPELLGGPSVFLFPPKPKDTLMISRTPEVTCVVVDVSHEDPEVKFNWYVDGVEVHNAKTKPREEQYNSTYRVVSVLTVLHQDWLNGKEYKCKVSNKALPAPIEKTISKAKGQPREPQVYTLPPSREEMTKNQVSLTCLVKGFYPSDIAVEWESNGQPENNYKTTPPVLDSDGSFFLYSKLTVDKSRWQQGNVFSCSVMHEALHNHYTQKSLSLSPGKMALIVLGGVAGLLLFIGLGIFFKRGRKKLLYIFKQPFMRPVQTTQEEDGCSCRFPEEEEGGCELRVKFSRSADAPAYKQGQNQLYNELNLGRREEYDVLDKRRGRDPEMGGKPRRKNPQEGLYNELQKDKMAEAYSEIGMKGERRRGKGHDGLYQGLSTATKDTYDALHMQALPPR

SEQ ID NO: 323 - DNA, 1506 bp, Artificial Sequence
  CAR E6 IgD/8/4-1BB/CD3z sequence
atggccctgcccgtgaccgctttgctgctccccctggcgctgctgctgcacgccgccaggccagaggtccagctggttgagagtggcggtgggctggttaagcctggcggctccctgcggctgagctgcgccgcgagtggatttactttcagccgatatgggatgagttgggtgcggcaagctcccgggaagaggctggaatgggtctcaacaatctccggggggggcacttacatctattaccccgactcagtcaaggggagatttaccatttcacgagacaacgctaagaataccctgtatttgcagatgaattctctgagagcagaggacacagctgtttactattgtacccgcgacaactatggcaggaactacgactacggtatggactattggggacaagggacattggttacagtgagcagtggcggcgggggcagcggaggaggaggcagcggtggcggaggcagcgagatagtgctcacgcagtcacccgcgactctcagtctctcacctggggaacgagctaccctgacgtgctctgctacctcctcagtgtcatatattcactggtatcagcaacggcccgggcagtcccctagattgctcatttatagtacctctaatctggcctcaggtatccctgcacgattttctggatctggttcaggttctgattacaccctcactatctctagcctggagcctgaagactttgccgtttattactgccagcagaggtctagctccccattcacctttgggagtgggaccaaggttgaaattaaagagtctccaaaggcacaggcctcctcagtgcccactgcacaaccccaagcagagggcagcctcgccaaggcaaccacagccccagccaccacccgtaacacaggaagaggcggcgaagagaagaaaaaggagaaggagaaagaggaacaagaagagagagagacaaagacaccaatctacatttgggccccgctcgcaggcacatgtggagtgctcctcctctccctggtgattaccctgtactgcaaaaggggccgcaaaaaactcctttacatttttaagcagccttttatgaggccagtacagacgactcaagaggaagacgggtgctcatgccgctttcctgaggaggaggaaggagggtgcgaactgcgcgttaagttctcccgatcagccgacgcgcctgcttacaagcagggccagaaccaactgtacaacgagctgaatctcggtagacgggaagagtacgacgtgttggacaaacggagaggccgcgacccagaaatgggcggcaagcctcgcaggaaaaacccccaggagggactgtacaatgagttgcagaaagataagatggcagaagcttatagcgagatcggaatgaagggggaaaggagacgagggaaaggacacgacggcctttatcagggcctgtccacagcaacaaaagatacgtatgacgccctccatatgcaggcacttccaccacggtgataa

SEQ ID NO: 324 - protein, 500 aa, Artificial Sequence
  CAR E6 IgD/8/4-1BB/CD3z sequence
MALPVTALLLPLALLLHAARPEVQLVESGGGLVKPGGSLRLSCAASGFTFSRYGMSWVRQAPGKRLEWVSTISGGGTYIYYPDSVKGRFTISRDNAKNTLYLQMNSLRAEDTAVYYCTRDNYGRNYDYGMDYWGQGTLVTVSSGGGGSGGGGSGGGGSEIVLTQSPATLSLSPGERATLTCSATSSVSYIHWYQQRPGQSPRLLIYSTSNLASGIPARFSGSGSGSDYTLTISSLEPEDFAVYYCQQRSSSPFTFGSGTKVEIKESPKAQASSVPTAQPQAEGSLAKATTAPATTRNTGRGGEEKKKEKEKEEQEERETKTPIYIWAPLAGTCGVLLLSLVITLYCKRGRKKLLYIFKQPFMRPVQTTQEEDGCSCRFPEEEEGGCELRVKFSRSADAPAYKQGQNQLYNELNLGRREEYDVLDKRRGRDPEMGGKPRRKNPQEGLYNELQKDKMAEAYSEIGMKGERRRGKGHDGLYQGLSTATKDTYDALHMQALPPR

SEQ ID NO: 325 - DNA, 475 bp, Artificial Sequence
  E6 CAR IgD8 pcDH gBLOCK sequence
agtacctctaatctggcctcaggtatccctgcacgattttctggatctggttcaggttctgattacaccctcactatctctagcctggagcctgaagactttgccgtttattactgccagcagaggtctagctccccattcacctttgggagtgggaccaaggttgaaattaaagagtctccaaaggcacaggcctcctcagtgcccactgcacaaccccaagcagagggcagcctcgccaaggcaaccacagccccagccaccacccgtaacacaggaagaggcggcgaagagaagaaaaaggagaaggagaaagaggaacaagaagagagagagacaaagacaccaatctacatttgggccccgctcgcaggcacatgtggagtgctcctcctctccctggtgattaccctgtactgcaaaaggggccgcaaaaaactcctttacatttttaagcagccttttatgaggccag

SEQ ID NO: 326 - DNA, 502 bp, Artificial Sequence
  E6 CAR BB 3 pCDH gBLOCK sequence
acatttttaagcagccttttatgaggccagtacagacgactcaagaggaagacgggtgctcatgccgctttcctgaggaggaggaaggagggtgcgaactgcgcgttaagttctcccgatcagccgacgcgcctgcttacaagcagggccagaaccaactgtacaacgagctgaatctcggtagacgggaagagtacgacgtgttggacaaacggagaggccgcgacccagaaatgggcggcaagcctcgcaggaaaaacccccaggagggactgtacaatgagttgcagaaagataagatggcagaagcttatagcgagatcggaatgaagggggaaaggagacgagggaaaggacacgacggcctttatcagggcctgtccacagcaacaaaagatacgtatgacgccctccatatgcaggcacttccaccacggtgataagtttaaacccgctgatcaggcggccgcgaaggatctgcgatcgctccggtgcccgtcag

SEQ ID NO: 327 - DNA, 1500 bp, Artificial Sequence
  CAR E6 IgD/4/4-1BB/CD3z sequence
atggccctgcccgtgaccgctttgctgctccccctggcgctgctgctgcacgccgccaggccagaggtccagctggttgagagtggcggtgggctggttaagcctggcggctccctgcggctgagctgcgccgcgagtggatttactttcagccgatatgggatgagttgggtgcggcaagctcccgggaagaggctggaatgggtctcaacaatctccggggggggcacttacatctattaccccgactcagtcaaggggagatttaccatttcacgagacaacgctaagaataccctgtatttgcagatgaattctctgagagcagaggacacagctgtttactattgtacccgcgacaactatggcaggaactacgactacggtatggactattggggacaagggacattggttacagtgagcagtggcggcgggggcagcggaggaggaggcagcggtggcggaggcagcgagatagtgctcacgcagtcacccgcgactctcagtctctcacctggggaacgagctaccctgacgtgctctgctacctcctcagtgtcatatattcactggtatcagcaacggcccgggcagtcccctagattgctcatttatagtacctctaatctggcctcaggtatccctgcacgattttctggatctggttcaggttctgattacaccctcactatctctagcctggagcctgaagactttgccgtttattactgccagcagaggtctagctccccattcacctttgggagtgggaccaaggttgaaattaaagagtctccaaaggcacaggcctcctcagtgcccactgcacaaccccaagcagagggcagcctcgccaaggcaaccacagccccagccaccacccgtaacacaggaagaggcggcgaagagaagaaaaaggagaaggagaaagaggaacaagaagagagagagacaaagacaccaatggccctgattgtgctggggggcgtcgccggcctcctgcttttcattgggctaggcatcttcttcaaaaggggccgcaaaaaactcctttacatttttaagcagccttttatgaggccagtacagacgactcaagaggaagacgggtgctcatgccgctttcctgaggaggaggaaggagggtgcgaactgcgcgttaagttctcccgatcagccgacgcgcctgcttacaagcagggccagaaccaactgtacaacgagctgaatctcggtagacgggaagagtacgacgtgttggacaaacggagaggccgcgacccagaaatgggcggcaagcctcgcaggaaaaacccccaggagggactgtacaatgagttgcagaaagataagatggcagaagcttatagcgagatcggaatgaagggggaaaggagacgagggaaaggacacgacggcctttatcagggcctgtccacagcaacaaaagatacgtatgacgccctccatatgcaggcacttccaccacggtgataa

SEQ ID NO: 328 - protein, 498 aa, Artificial Sequence
  CAR E6 IgD/4/4-1BB/CD3z sequence
MALPVTALLLPLALLLHAARPEVQLVESGGGLVKPGGSLRLSCAASGFTFSRYGMSWVRQAPGKRLEWVSTISGGGTYIYYPDSVKGRFTISRDNAKNTLYLQMNSLRAEDTAVYYCTRDNYGRNYDYGMDYWGQGTLVTVSSGGGGSGGGGSGGGGSEIVLTQSPATLSLSPGERATLTCSATSSVSYIHWYQQRPGQSPRLLIYSTSNLASGIPARFSGSGSGSDYTLTISSLEPEDFAVYYCQQRSSSPFTFGSGTKVEIKESPKAQASSVPTAQPQAEGSLAKATTAPATTRNTGRGGEEKKKEKEKEEQEERETKTPMALIVLGGVAGLLLFIGLGIFFKRGRKKLLYIFKQPFMRPVQTTQEEDGCSCRFPEEEEGGCELRVKFSRSADAPAYKQGQNQLYNELNLGRREEYDVLDKRRGRDPEMGGKPRRKNPQEGLYNELQKDKMAEAYSEIGMKGERRRGKGHDGLYQGLSTATKDTYDALHMQALPPR

SEQ ID NO: 329 - DNA, 469 bp, Artificial Sequence
  E6 CAR IgD4 pcDH gBLOCK sequence
agtacctctaatctggcctcaggtatccctgcacgattttctggatctggttcaggttctgattacaccctcactatctctagcctggagcctgaagactttgccgtttattactgccagcagaggtctagctccccattcacctttgggagtgggaccaaggttgaaattaaagagtctccaaaggcacaggcctcctcagtgcccactgcacaaccccaagcagagggcagcctcgccaaggcaaccacagccccagccaccacccgtaacacaggaagaggcggcgaagagaagaaaaaggagaaggagaaagaggaacaagaagagagagagacaaagacaccaatggccctgattgtgctggggggcgtcgccggcctcctgcttttcattgggctaggcatcttcttcaaaaggggccgcaaaaaactcctttacatttttaagcagccttttatgaggccag

SEQ ID NO: 330 - DNA, 1461 bp, Artificial Sequence
  CAR E6 X4/8/4-1BB/CD3z sequence
atggccctgcccgtgaccgctttgctgctccccctggcgctgctgctgcacgccgccaggccagaggtccagctggttgagagtggcggtgggctggttaagcctggcggctccctgcggctgagctgcgccgcgagtggatttactttcagccgatatgggatgagttgggtgcggcaagctcccgggaagaggctggaatgggtctcaacaatctccggggggggcacttacatctattaccccgactcagtcaaggggagatttaccatttcacgagacaacgctaagaataccctgtatttgcagatgaattctctgagagcagaggacacagctgtttactattgtacccgcgacaactatggcaggaactacgactacggtatggactattggggacaagggacattggttacagtgagcagtggcggcgggggcagcggaggaggaggcagcggtggcggaggcagcgagatagtgctcacgcagtcacccgcgactctcagtctctcacctggggaacgagctaccctgacgtgctctgctacctcctcagtgtcatatattcactggtatcagcaacggcccgggcagtcccctagattgctcatttatagtacctctaatctggcctcaggtatccctgcacgattttctggatctggttcaggttctgattacaccctcactatctctagcctggagcctgaagactttgccgtttattactgccagcagaggtctagctccccattcacctttgggagtgggaccaaggttgaaattaaagacaagacgcacaccaagccacctaaaccagctccagaactgctcggaggtcctggcaccggaaccggaggacctaccatcaaaccacctaagccacctaagcctgctcctaacctgctcggaggacctatctacatttgggccccgctcgcaggcacatgtggagtgctcctcctctccctggtgattaccctgtactgcaaaaggggccgcaaaaaactcctttacatttttaagcagccttttatgaggccagtacagacgactcaagaggaagacgggtgctcatgccgctttcctgaggaggaggaaggagggtgcgaactgcgcgttaagttctcccgatcagccgacgcgcctgcttacaagcagggccagaaccaactgtacaacgagctgaatctcggtagacgggaagagtacgacgtgttggacaaacggagaggccgcgacccagaaatgggcggcaagcctcgcaggaaaaacccccaggagggactgtacaatgagttgcagaaagataagatggcagaagcttatagcgagatcggaatgaagggggaaaggagacgagggaaaggacacgacggcctttatcagggcctgtccacagcaacaaaagatacgtatgacgccctccatatgcaggcacttccaccacggtgataa

SEQ ID NO: 331 - protein, 485 aa, Artificial Sequence
  CAR E6 X4/8/4-1BB/CD3z sequence
MALPVTALLLPLALLLHAARPEVQLVESGGGLVKPGGSLRLSCAASGFTFSRYGMSWVRQAPGKRLEWVSTISGGGTYIYYPDSVKGRFTISRDNAKNTLYLQMNSLRAEDTAVYYCTRDNYGRNYDYGMDYWGQGTLVTVSSGGGGSGGGGSGGGGSEIVLTQSPATLSLSPGERATLTCSATSSVSYIHWYQQRPGQSPRLLIYSTSNLASGIPARFSGSGSGSDYTLTISSLEPEDFAVYYCQQRSSSPFTFGSGTKVEIKDKTHTKPPKPAPELLGGPGTGTGGPTIKPPKPPKPAPNLLGGPIYIWAPLAGTCGVLLLSLVITLYCKRGRKKLLYIFKQPFMRPVQTTQEEDGCSCRFPEEEEGGCELRVKFSRSADAPAYKQGQNQLYNELNLGRREEYDVLDKRRGRDPEMGGKPRRKNPQEGLYNELQKDKMAEAYSEIGMKGERRRGKGHDGLYQGLSTATKDTYDALHMQALPPR

SEQ ID NO: 332 - DNA, 430 bp, Artificial Sequence
  E6 CAR X48 pCDH gBLOCK sequence
agtacctctaatctggcctcaggtatccctgcacgattttctggatctggttcaggttctgattacaccctcactatctctagcctggagcctgaagactttgccgtttattactgccagcagaggtctagctccccattcacctttgggagtgggaccaaggttgaaattaaagacaagacgcacaccaagccacctaaaccagctccagaactgctcggaggtcctggcaccggaaccggaggacctaccatcaaaccacctaagccacctaagcctgctcctaacctgctcggaggacctatctacatttgggccccgctcgcaggcacatgtggagtgctcctcctctccctggtgattaccctgtactgcaaaaggggccgcaaaaaactcctttacatttttaagcagccttttatgaggccag

SEQ ID NO: 333 - DNA, 1455 bp, Artificial Sequence
  CAR E6 X4/4/4-1BB/CD3z sequence
atggccctgcccgtgaccgctttgctgctccccctggcgctgctgctgcacgccgccaggccagaggtccagctggttgagagtggcggtgggctggttaagcctggcggctccctgcggctgagctgcgccgcgagtggatttactttcagccgatatgggatgagttgggtgcggcaagctcccgggaagaggctggaatgggtctcaacaatctccggggggggcacttacatctattaccccgactcagtcaaggggagatttaccatttcacgagacaacgctaagaataccctgtatttgcagatgaattctctgagagcagaggacacagctgtttactattgtacccgcgacaactatggcaggaactacgactacggtatggactattggggacaagggacattggttacagtgagcagtggcggcgggggcagcggaggaggaggcagcggtggcggaggcagcgagatagtgctcacgcagtcacccgcgactctcagtctctcacctggggaacgagctaccctgacgtgctctgctacctcctcagtgtcatatattcactggtatcagcaacggcccgggcagtcccctagattgctcatttatagtacctctaatctggcctcaggtatccctgcacgattttctggatctggttcaggttctgattacaccctcactatctctagcctggagcctgaagactttgccgtttattactgccagcagaggtctagctccccattcacctttgggagtgggaccaaggttgaaattaaagacaagacgcacaccaagccacctaaaccagctccagaactgctcggaggtcctggcaccggaaccggaggacctaccatcaaaccacctaagccacctaagcctgctcctaacctgctcggaggacctatggccctgattgtgctggggggcgtcgccggcctcctgcttttcattgggctaggcatcttcttcaaaaggggccgcaaaaaactcctttacatttttaagcagccttttatgaggccagtacagacgactcaagaggaagacgggtgctcatgccgctttcctgaggaggaggaaggagggtgcgaactgcgcgttaagttctcccgatcagccgacgcgcctgcttacaagcagggccagaaccaactgtacaacgagctgaatctcggtagacgggaagagtacgacgtgttggacaaacggagaggccgcgacccagaaatgggcggcaagcctcgcaggaaaaacccccaggagggactgtacaatgagttgcagaaagataagatggcagaagcttatagcgagatcggaatgaagggggaaaggagacgagggaaaggacacgacggcctttatcagggcctgtccacagcaacaaaagatacgtatgacgccctccatatgcaggcacttccaccacggtgataa

SEQ ID NO: 334 - protein, 483 aa, Artificial Sequence
  CAR E6 X4/4/4-1BB/CD3z sequence
MALPVTALLLPLALLLHAARPEVQLVESGGGLVKPGGSLRLSCAASGFTFSRYGMSWVRQAPGKRLEWVSTISGGGTYIYYPDSVKGRFTISRDNAKNTLYLQMNSLRAEDTAVYYCTRDNYGRNYDYGMDYWGQGTLVTVSSGGGGSGGGGSGGGGSEIVLTQSPATLSLSPGERATLTCSATSSVSYIHWYQQRPGQSPRLLIYSTSNLASGIPARFSGSGSGSDYTLTISSLEPEDFAVYYCQQRSSSPFTFGSGTKVEIKDKTHTKPPKPAPELLGGPGTGTGGPTIKPPKPPKPAPNLLGGPMALIVLGGVAGLLLFIGLGIFFKRGRKKLLYIFKQPFMRPVQTTQEEDGCSCRFPEEEEGGCELRVKFSRSADAPAYKQGQNQLYNELNLGRREEYDVLDKRRGRDPEMGGKPRRKNPQEGLYNELQKDKMAEAYSEIGMKGERRRGKGHDGLYQGLSTATKDTYDALHMQALPPR

SEQ ID NO: 335 - DNA, 424 bp, Artificial Sequence
  E6 CAR X44 pCDH gBLOCK sequence
agtacctctaatctggcctcaggtatccctgcacgattttctggatctggttcaggttctgattacaccctcactatctctagcctggagcctgaagactttgccgtttattactgccagcagaggtctagctccccattcacctttgggagtgggaccaaggttgaaattaaagacaagacgcacaccaagccacctaaaccagctccagaactgctcggaggtcctggcaccggaaccggaggacctaccatcaaaccacctaagccacctaagcctgctcctaacctgctcggaggacctatggccctgattgtgctggggggcgtcgccggcctcctgcttttcattgggctaggcatcttcttcaaaaggggccgcaaaaaactcctttacatttttaagcagccttttatgaggccag

SEQ ID NO: 336 - DNA, 1461 bp, Artificial Sequence
  CAR E6 8+4/4/4-1BB/CD3z sequence
atggccctgcccgtgaccgctttgctgctccccctggcgctgctgctgcacgccgccaggccagaggtccagctggttgagagtggcggtgggctggttaagcctggcggctccctgcggctgagctgcgccgcgagtggatttactttcagccgatatgggatgagttgggtgcggcaagctcccgggaagaggctggaatgggtctcaacaatctccggggggggcacttacatctattaccccgactcagtcaaggggagatttaccatttcacgagacaacgctaagaataccctgtatttgcagatgaattctctgagagcagaggacacagctgtttactattgtacccgcgacaactatggcaggaactacgactacggtatggactattggggacaagggacattggttacagtgagcagtggcggcgggggcagcggaggaggaggcagcggtggcggaggcagcgagatagtgctcacgcagtcacccgcgactctcagtctctcacctggggaacgagctaccctgacgtgctctgctacctcctcagtgtcatatattcactggtatcagcaacggcccgggcagtcccctagattgctcatttatagtacctctaatctggcctcaggtatccctgcacgattttctggatctggttcaggttctgattacaccctcactatctctagcctggagcctgaagactttgccgtttattactgccagcagaggtctagctccccattcacctttgggagtgggaccaaggttgaaattaaaacgacaaccccggcccccagaccaccaacgccagcccccaccatcgccagccaacccctgtctctgagaccagaagcctgtaggcctgccgccggtggagctgtgcacacaagaggactggatttcgcctgtgatatggccctgattgtgctggggggcgtcgccggcctcctgcttttcattgggctaggcatcttcttcaaaaggggccgcaaaaaactcctttacatttttaagcagccttttatgaggccagtacagacgactcaagaggaagacgggtgctcatgccgctttcctgaggaggaggaaggagggtgcgaactgcgcgttaagttctcccgatcagccgacgcgcctgcttacaagcagggccagaaccaactgtacaacgagctgaatctcggtagacgggaagagtacgacgtgttggacaaacggagaggccgcgacccagaaatgggcggcaagcctcgcaggaaaaacccccaggagggactgtacaatgagttgcagaaagataagatggcagaagcttatagcgagatcggaatgaagggggaaaggagacgagggaaaggacacgacggcctttatcagggcctgtccacagcaacaaaagatacgtatgacgccctccatatgcaggcacttccaccacggtgataa

SEQ ID NO: 337 - protein, 485 aa, Artificial Sequence
  CAR E6 8+4/4/4-1BB/CD3z sequence
MALPVTALLLPLALLLHAARPEVQLVESGGGLVKPGGSLRLSCAASGFTFSRYGMSWVRQAPGKRLEWVSTISGGGTYIYYPDSVKGRFTISRDNAKNTLYLQMNSLRAEDTAVYYCTRDNYGRNYDYGMDYWGQGTLVTVSSGGGGSGGGGSGGGGSEIVLTQSPATLSLSPGERATLTCSATSSVSYIHWYQQRPGQSPRLLIYSTSNLASGIPARFSGSGSGSDYTLTISSLEPEDFAVYYCQQRSSSPFTFGSGTKVEIKTTTPAPRPPTPAPTIASQPLSLRPEACRPAAGGAVHTRGLDFACDMALIVLGGVAGLLLFIGLGIFFKRGRKKLLYIFKQPFMRPVQTTQEEDGCSCRFPEEEEGGCELRVKFSRSADAPAYKQGQNQLYNELNLGRREEYDVLDKRRGRDPEMGGKPRRKNPQEGLYNELQKDKMAEAYSEIGMKGERRRGKGHDGLYQGLSTATKDTYDALHMQALPPR

SEQ ID NO: 338 - DNA, 430 bp, Artificial Sequence
  E6 CAR CD844 pCDH gBLOCK sequence
agtacctctaatctggcctcaggtatccctgcacgattttctggatctggttcaggttctgattacaccctcactatctctagcctggagcctgaagactttgccgtttattactgccagcagaggtctagctccccattcacctttgggagtgggaccaaggttgaaattaaaacgacaaccccggcccccagaccaccaacgccagcccccaccatcgccagccaacccctgtctctgagaccagaagcctgtaggcctgccgccggtggagctgtgcacacaagaggactggatttcgcctgtgatatggccctgattgtgctggggggcgtcgccggcctcctgcttttcattgggctaggcatcttcttcaaaaggggccgcaaaaaactcctttacatttttaagcagccttttatgaggccag

SEQ ID NO: 339 - DNA, 820 bp, Artificial Sequence
  Humanized C2 scFV sequence in CAR
gagggccaccatggccttgccagtgacggccctgctgctgccattggctcttctgttgcacgctgccaggcctgaagtgcagctcgtagagagtggcgggggactggtgaagcccggtggaagcctcagactcagttgcgccgcctcaggtttcactttttcaggttacgccatgtcctgggtaagacaggcaccggggaaaggactcgagtgggtgtctactatcagctcaggaggcacttatatatattatcctgactctgtaaaaggccgatttacgatttctcgcgacaatgcaaagaactccctctacctccaaatgaacagtcttagggcagaagacactgctgtatactattgtgcacgcctcggcggcgacaactactacgagtactttgacgtgtgggggaaagggactaccgtgacagtttcaagcggaggaggtggctcaggtggaggcgggtcaggggggggaggaagtgatattgtgctcacacaatccccagcctccctggctgtgtctcccggccaacgcgctacaattacatgtcgggcctccaaaagcgtgagcaccagcggctacagctacatgcactggtatcaacagaaaccaggacaaccccccaaactgttgatttatctcgcttcaaacttggagtccggcgtgcctgcgcgcttttcagggagtgggagcggcacagattttacgctgactatcaaccccgtagaagcaaacgatacagcgaattattattgtcaacattcccgggaactcccctttacgttcggcgggggcacaaaggtcgaaattaagagaacc

SEQ ID NO: 340 - protein, 249 aa, Artificial Sequence; identical to SEQ ID NO: 239
  Humanized C2 scFV sequence in CAR

SEQ ID NO: 341 - DNA, 729 bp, Artificial Sequence
  Humanized E6 scFV sequence in CAR
gaggtccagctggttgagagtggcggtgggctggttaagcctggcggctccctgcggctgagctgcgccgcgagtggatttactttcagccgatatgggatgagttgggtgcggcaagctcccgggaagaggctggaatgggtctcaacaatctccggggggggcacttacatctattaccccgactcagtcaaggggagatttaccatttcacgagacaacgctaagaataccctgtatttgcagatgaattctctgagagcagaggacacagctgtttactattgtacccgcgacaactatggcaggaactacgactacggtatggactattggggacaagggacattggttacagtgagcagtggcggcgggggcagcggaggaggaggcagcggtggggggggcagcgagatagtgctcacgcagtcacccgcgactctcagtctctcacctggggaacgagctaccctgacgtgctctgctacctcctcagtgtcatatattcactggtatcagcaacggcccgggcagtcccctagattgctcatttatagtacctctaatctggcctcaggtatccctgcacgattttctggatctggttcaggttctgattacaccctcactatctctagcctggagcctgaagactttgccgtttattactgccagcagaggtctagctccccattcacctttgggagtgggaccaaggttgaaattaaa

SEQ ID NO: 342 - protein, 243 aa, Artificial Sequence; identical to SEQ ID NO: 233
  Humanized E6 scFV sequence in CAR

SEQ ID NO: 343 - DNA, 63 bp, Artificial Sequence
  CD8 leader sequence
atggccctgcccgtgaccgctttgctgctccccctggcgctgctgctgcacgccgccaggcca

SEQ ID NO: 344 - protein, 21 aa, Artificial Sequence
  CD8 leader sequence
MALPVTALLLPLALLLHAARP

SEQ ID NO: 345 - DNA, 135 bp, Artificial Sequence
  CD8 hinge domain sequence
acgacaaccccggcccccagaccaccaacgccagcccccaccatcgccagccaacccctgtctctgagaccagaagcctgtaggcctgccgccggtggagctgtgcacacaagaggactggatttcgcctgtgat

SEQ ID NO: 346 - protein, 45 aa, Artificial Sequence
  CD8 hinge domain sequence
TTTPAPRPPTPAPTIASQPLSLRPEACRPAAGGAVHTRGLDFACD

SEQ ID NO: 347 - DNA, 66 bp, Artificial Sequence
  CD4 hinge domain sequence
tcgggacaggtcctgctggaatccaacatcaaggttctgcccacatggtccaccccggtgcagcca

SEQ ID NO: 348 - protein, 22 aa, Artificial Sequence
  CD4 hinge domain sequence
SGQVLLESNIKVLPTWSTPVQP

SEQ ID NO: 349 - DNA, 45 bp, Artificial Sequence
  CD28 hinge domain sequence
aaacacctttgtccaagtcccctatttcccggaccttctaagccc

SEQ ID NO: 350 - protein, 15 aa, Artificial Sequence
  CD28 hinge domain sequence
KHLCPSPLFPGPSKP

SEQ ID NO: 351 - DNA, 201 bp, Artificial Sequence
  CD8+CD4 hinge domain sequence
acgacaaccccggcccccagaccaccaacgccagcccccaccatcgccagccaacccctgtctctgagaccagaagcctgtaggcctgccgccggtggagctgtgcacacaagaggactggatttcgcctgtgattcgggacaggtcctgctggaatccaacatcaaggttctgcccacatggtccaccccggtgcagcca

SEQ ID NO: 352 - protein, 67 aa, Artificial Sequence
  CD8+CD4 hinge domain sequence
TTTPAPRPPTPAPTIASQPLSLRPEACRPAAGGAVHTRGLDFACDSGQVLLESNIKVLPTWSTPVQP

SEQ ID NO: 353 - DNA, 180 bp, Artificial Sequence
  CD8+CD28 hinge domain sequence
acgacaaccccggcccccagaccaccaacgccagcccccaccatcgccagccaacccctgtctctgagaccagaagcctgtaggcctgccgccggtggagctgtgcacacaagaggactggatttcgcctgtgataaacacctttgtccaagtcccctatttcccggaccttctaagccc

SEQ ID NO: 354 - protein, 60 aa, Artificial Sequence
  CD8+CD28 hinge domain sequence
TTTPAPRPPTPAPTIASQPLSLRPEACRPAAGGAVHTRGLDFACDKHLCPSPLFPGPSKP

SEQ ID NO: 355 - DNA, 111 bp, Artificial Sequence
  CD28+CD4 hinge domain sequence
aaacacctttgtccaagtcccctatttcccggaccttctaagccctcgggacaggtcctgctggaatccaacatcaaggttctgcccacatggtccaccccggtgcagcca

SEQ ID NO: 356 - protein, 37 aa, Artificial Sequence
  CD28+CD4 hinge domain sequence
KHLCPSPLFPGPSKPSGQVLLESNIKVLPTWSTPVQP

SEQ ID NO: 357 - DNA, 174 bp, Artificial Sequence
  Human IgD hinge domain sequence
gagtctccaaaggcacaggcctcctcagtgcccactgcacaaccccaagcagagggcagcctcgccaaggcaaccacagccccagccaccacccgtaacacaggaagaggcggcgaagagaagaaaaaggagaaggagaaagaggaacaagaagagagagagacaaagacacca

SEQ ID NO: 358 - protein, 58 aa, Artificial Sequence
  Human IgD hinge domain sequence
ESPKAQASSVPTAQPQAEGSLAKATTAPATTRNTGRGGEEKKKEKEKEEQEERETKTP

SEQ ID NO: 359 - DNA, 129 bp, Artificial Sequence
  X4 linker (IgG1 and IgG2 modified hinge region) sequence
gacaagacgcacaccaagccacctaaaccagctccagaactgctcggaggtcctggcaccggaaccggaggacctaccatcaaaccacctaagccacctaagcctgctcctaacctgctcggaggacct

SEQ ID NO: 360 - protein, 43 aa, Artificial Sequence
  X4 linker (IgG1 and IgG2 modified hinge region) sequence
DKTHTKPPKPAPELLGGPGTGTGGPTIKPPKPPKPAPNLLGGP

SEQ ID NO: 361 - DNA, 63 bp, Artificial Sequence
  CD3 zeta transmembrane domain sequence
ctctgctacctgctggatggaatcctcttcatctatggtgtcattctcactgccttgttcctg

SEQ ID NO: 362 - protein, 21 aa, Artificial Sequence
  CD3 zeta transmembrane domain sequence
LCYLLDGILFIYGVILTALFL

SEQ ID NO: 363 - DNA, 72 bp, Artificial Sequence
  CD8 transmembrane domain sequence
atctacatttgggccccgctcgcaggcacatgtggagtgctcctcctctccctggtgattaccctgtactgc

SEQ ID NO: 364 - protein, 24 aa, Artificial Sequence
  CD8 transmembrane domain sequence
IYIWAPLAGTCGVLLLSLVITLYC

SEQ ID NO: 365 - DNA, 66 bp, Artificial Sequence
  CD4 transmembrane domain sequence
atggccctgattgtgctggggggcgtcgccggcctcctgcttttcattgggctaggcatcttcttc

SEQ ID NO: 366 - protein, 22 aa, Artificial Sequence
  CD4 transmembrane domain sequence
MALIVLGGVAGLLLFIGLGIFF

SEQ ID NO: 367 - DNA, 81 bp, Artificial Sequence
  CD28 transmembrane domain sequence
ttttgggtgctggtggtggttggtggagtcctggcttgctatagcttgctagtaacagtggcctttattattttctgggtg

SEQ ID NO: 368 - protein, 27 aa, Artificial Sequence
  CD28 transmembrane domain sequence
FWVLVVVGGVLACYSLLVTVAFIIFWV

SEQ ID NO: 369 - DNA, 81 bp, Artificial Sequence
  4-1BB transmembrane domain sequence
atcatctccttctttcttgcgctgacgtcgactgcgttgctcttcctgctgttcttcctcacgctccgtttctctgttgtt

SEQ ID NO: 370 - protein, 27 aa, Artificial Sequence
  4-1BB transmembrane domain sequence
IISFFLALTSTALLFLLFFLTLRFSVV

SEQ ID NO: 371 - DNA, 78 bp, Artificial Sequence
  OX40 transmembrane domain sequence
gttgccgccatcctgggcctgggcctggtgctggggctgctgggccccctggccatcctgctggccctgtacctgctc

SEQ ID NO: 372 - protein, 26 aa, Artificial Sequence
  OX40 transmembrane domain sequence
VAAILGLGLVLGLLGPLAILLALYLL

SEQ ID NO: 373 - DNA, 336 bp, Artificial Sequence
  CD3 zeta domain sequence
cgcgttaagttctcccgatcagccgacgcgcctgcttacaagcagggccagaaccaactgtacaacgagctgaatctcggtagacgggaagagtacgacgtgttggacaaacggagaggccgcgacccagaaatgggcggcaagcctcgcaggaaaaacccccaggagggactgtacaatgagttgcagaaagataagatggcagaagcttatagcgagatcggaatgaagggggaaaggagacgagggaaaggacacgacggcctttatcagggcctgtccacagcaacaaaagatacgtatgacgccctccatatgcaggcacttccaccacgg

SEQ ID NO: 374 - protein, 112 aa, Artificial Sequence
  CD3 zeta domain sequence
RVKFSRSADAPAYKQGQNQLYNELNLGRREEYDVLDKRRGRDPEMGGKPRRKNPQEGLYNELQKDKMAEAYSEIGMKGERRRGKGHDGLYQGLSTATKDTYDALHMQALPPR

SEQ ID NO: 375 - DNA, 336 bp, Artificial Sequence
  CD3 zeta domain variant sequence
agagtgaagttcagcaggagcgcagacgcccccgcgtaccagcagggccagaaccagctctataacgagctcaatctaggacgaagagaggagtacgatgttttggacaagagacgtggccgggaccctgagatggggggaaagccgagaaggaagaaccctcaggaaggcctgtacaatgaactgcagaaagataagatggcggaggcctacagtgagattgggatgaaaggcgagcgccggaggggcaaggggcacgatggcctttaccagggtctcagtacagccaccaaggacacctacgacgcccttcacatgcaggccctgccccctcgc

SEQ ID NO: 376 - protein, 112 aa, Artificial Sequence
  CD3 zeta domain variant sequence
RVKFSRSADAPAYQQGQNQLYNELNLGRREEYDVLDKRRGRDPEMGGKPRRKNPQEGLYNELQKDKMAEAYSEIGMKGERRRGKGHDGLYQGLSTATKDTYDALHMQALPPR

SEQ ID NO: 377 - DNA, 123 bp, Artificial Sequence
  CD28 domain sequence
agaagcaagcggtctcggctcctgcattctgattacatgaacatgaccccaagaagaccaggccccaccaggaaacattaccagccctacgctccgccacgcgacttcgctgcctaccggtcc

SEQ ID NO: 378 - protein, 41 aa, Artificial Sequence
  CD28 domain sequence
RSKRSRLLHSDYMNMTPRRPGPTRKHYQPYAPPRDFAAYRS

SEQ ID NO: 379 - DNA, 126 bp, Artificial Sequence
  4-1BB domain sequence
aaaaggggccgcaaaaaactcctttacatttttaagcagccttttatgaggccagtacagacgactcaagaggaagacgggtgctcatgccgctttcctgaggaggaggaaggagggtgcgaactg

SEQ ID NO: 380 - protein, 42 aa, Artificial Sequence
  4-1BB domain sequence
KRGRKKLLYIFKQPFMRPVQTTQEEDGCSCRFPEEEEGGCEL

SEQ ID NO: 381 - DNA, 111 bp, Artificial Sequence
  OX40 domain sequence
cggagggaccagaggctgccccccgatgcccacaagccccctgggggaggcagtttccggacccccatccaagaggagcaggccgacgcccactccaccctggccaagatc

SEQ ID NO: 382 - protein, 37 aa, Artificial Sequence
  OX40 domain sequence
RRDQRLPPDAHKPPGGGSFRTPIQEEQADAHSTLAKI

SEQ ID NO: 383 - DNA, 723 bp, Artificial Sequence
  Humanized anti CD3 scFV clone 12F6 (VH-VL) sequence
caggtgcagctggtgcagagcggaggtggagtggtccaacctggaagatctctgagactgagctgtaaggctagcgggtacacgttcacatcttacacgatgcactgggtgaggcaagcccccggtaagggcctggaatggatcggatatataaaccccagctcagggtataccaaatataatcagaagttcaaagatcggttcacgatttctgctgataaaagtaagtccaccgctttcctgcagatggactcactcaggccagaagatactggtgtttatttctgtgcaaggtggcaggactacgacgtgtactttgactattgggggcaggggacgcctgtaacagtatcaagcggcggtggcggatccggcggtggcggatccggcggtggcggatccgatattcagatgacccagagcccgagcagcctgagcgcgagcgtgggcgatcgcgtgaccatgacctgccgcgcgagcagcagcgtgagctatatgcattggtatcagcagaccccgggcaaagcgccgaaaccgtggatttatgcgaccagcaacctggcgagcggcgtgccgagccgctttagcggcagcggcagcggcaccgattataccctgaccattagcagcctgcagccggaagatattgcgacctattattgccagcagtggagcagcaacccgccgacctttggccagggcaccaaactgcagattacccgc

SEQ ID NO: 384 - protein, 241 aa, Artificial Sequence
  Humanized anti CD3 scFV clone 12F6 (VH-VL) sequence
QVQLVQSGGGVVQPGRSLRLSCKASGYTFTSYTMHWVRQAPGKGLEWIGYINPSSGYTKYNQKFKDRFTISADKSKSTAFLQMDSLRPEDTGVYFCARWQDYDVYFDYWGQGTPVTVSSGGGGSGGGGSGGGGSDIQMTQSPSSLSASVGDRVTMTCRASSSVSYMHWYQQTPGKAPKPWIYATSNLASGVPSRFSGSGSGTDYTLTISSLQPEDIATYYCQQWSSNPPTFGQGTKLQITR

SEQ ID NO: 385 - DNA, 723 bp, Artificial Sequence
  Humanized anti CD3 scFV clone 12F6 (VL-VH) sequence
gatattcagatgacccagagcccgagcagcctgagcgcgagcgtgggcgatcgcgtgaccatgacctgccgcgcgagcagcagcgtgagctatatgcattggtatcagcagaccccgggcaaagcgccgaaaccgtggatttatgcgaccagcaacctggcgagcggcgtgccgagccgctttagcggcagcggcagcggcaccgattataccctgaccattagcagcctgcagccggaagatattgcgacctattattgccagcagtggagcagcaacccgccgacctttggccagggcaccaaactgcagattacccgcggcggtggcggatccggcggtggcggatccggcggtggcggatcccaggtgcagctggtgcagagcggaggtggagtggtccaacctggaagatctctgagactgagctgtaaggctagcgggtacacgttcacatcttacacgatgcactgggtgaggcaagcccccggtaagggcctggaatggatcggatatataaaccccagctcagggtataccaaatataatcagaagttcaaagatcggttcacgatttctgctgataaaagtaagtccaccgctttcctgcagatggactcactcaggccagaagatactggtgtttatttctgtgcaaggtggcaggactacgacgtgtactttgactattgggggcaggggacgcctgtaacagtatcaagc

SEQ ID NO: 386 - protein, 241 aa, Artificial Sequence
  Humanized anti CD3 scFV clone 12F6 (VL-VH) sequence
DIQMTQSPSSLSASVGDRVTMTCRASSSVSYMHWYQQTPGKAPKPWIYATSNLASGVPSRFSGSGSGTDYTLTISSLQPEDIATYYCQQWSSNPPTFGQGTKLQITRGGGGSGGGGSGGGGSQVQLVQSGGGVVQPGRSLRLSCKASGYTFTSYTMHWVRQAPGKGLEWIGYINPSSGYTKYNQKFKDRFTISADKSKSTAFLQMDSLRPEDTGVYFCARWQDYDVYFDYWGQGTPVTVSS

SEQ ID NO: 387 - DNA, 723 bp, Artificial Sequence
  Humanized anti CD3 scFV clone OKT3 (VH-VL) sequence
caggtgcagctggtgcagagcggaggcggagtggtgcagcctggaagaagcctgcgcctgagctgcaaagcgagcggctatacctttacccgctataccatgcattgggtgcgccaggcgccgggcaaaggcctggaatggattggctatattaacccgagccgcggctataccaactataaccagaaagtgaaagatcgctttaccattagcaccgataaaagcaaaagcaccgcgtttctgcagatggatagcctgcgcccggaagataccgcggtgtattattgcgcgcgctattatgatgatcattattgcctggattattggggccagggcaccaccctgaccgtgagcagcggcggtggcggatccggcggtggcggatccggcggtggcggatccgatattcagatgacccagagcccgagcagcctgagcgcgagcgtgggcgatcgcgtgaccattacctgcagcgcgagcagcagcgtgagctatatgaactggtatcagcagaccccgggcaaagcgccgaaacgctggatttatgataccagcaaactggcgagcggcgtgccgagccgctttagcggcagcggcagcggcaccgattatacctttaccattagcagcctgcagccggaagatattgcgacctattattgccagcagtggagcagcaacccgtttacctttggccagggcaccaaactgcagattacccgc

SEQ ID NO: 388 - protein, 241 aa, Artificial Sequence
  Humanized anti CD3 scFV clone OKT3 (VH-VL) sequence
QVQLVQSGGGVVQPGRSLRLSCKASGYTFTRYTMHWVRQAPGKGLEWIGYINPSRGYTNYNQKVKDRFTISTDKSKSTAFLQMDSLRPEDTAVYYCARYYDDHYCLDYWGQGTTLTVSSGGGGSGGGGSGGGGSDIQMTQSPSSLSASVGDRVTITCSASSSVSYMNWYQQTPGKAPKRWIYDTSKLASGVPSRFSGSGSGTDYTFTISSLQPEDIATYYCQQWSSNPFTFGQGTKLQITR

SEQ ID NO: 389 - DNA, 723 bp, Artificial Sequence
  Humanized anti CD3 scFV clone OKT3 (VH-VL) sequence
gatattcagatgacccagagcccgagcagcctgagcgcgagcgtgggcgatcgcgtgaccattacctgcagcgcgagcagcagcgtgagctatatgaactggtatcagcagaccccgggcaaagcgccgaaacgctggatttatgataccagcaaactggcgagcggcgtgccgagccgctttagcggcagcggcagcggcaccgattatacctttaccattagcagcctgcagccggaagatattgcgacctattattgccagcagtggagcagcaacccgtttacctttggccagggcaccaaactgcagattacccgcggcggtggcggatccggcggtggcggatccggcggtggcggatcccaggtgcagctggtgcagagcggaggcggagtggtgcagcctggaagaagcctgcgcctgagctgcaaagcgagcggctatacctttacccgctataccatgcattgggtgcgccaggcgccgggcaaaggcctggaatggattggctatattaacccgagccgcggctataccaactataaccagaaagtgaaagatcgctttaccattagcaccgataaaagcaaaagcaccgcgtttctgcagatggatagcctgcgcccggaagataccgcggtgtattattgcgcgcgctattatgatgatcattattgcctggattattggggccagggcaccaccctgaccgtgagcagc

SEQ ID NO: 390 - protein, 241 aa, Artificial Sequence
  Humanized anti CD3 scFV clone OKT3 (VH-VL) sequence
DIQMTQSPSSLSASVGDRVTITCSASSSVSYMNWYQQTPGKAPKRWIYDTSKLASGVPSRFSGSGSGTDYTFTISSLQPEDIATYYCQQWSSNPFTFGQGTKLQITRGGGGSGGGGSGGGGSQVQLVQSGGGVVQPGRSLRLSCKASGYTFTRYTMHWVRQAPGKGLEWIGYINPSRGYTNYNQKVKDRFTISTDKSKSTAFLQMDSLRPEDTAVYYCARYYDDHYCLDYWGQGTTLTVSS

SEQ ID NO: 391 - DNA, 729 bp, Artificial Sequence; identical to SEQ ID NO: 232
  HumanizeE6 scFV (VH-VL) sequence

SEQ ID NO: 392 - protein, 243 aa, Artificial Sequence; identical to SEQ ID NO: 233
  HumanizeE6 scFV (VH-VL) sequence

SEQ ID NO: 393 - DNA, 729 bp, Artificial Sequence
  HumanizeE6 scFV (VL-VH) sequence
gaaattgtgttgacacagtctccagccaccctgtctttgtctccaggggaaagagccaccctcacctgcagcgccaccagcagtgttagctacatccactggtaccaacagaggcctggccagagccccaggctcctcatctatagcacctccaacctggccagcggcatcccagccaggttcagtggcagtgggtctgggagcgactacactctcaccatcagcagcctagagcctgaagattttgcagtttattactgtcagcagcgtagcagctcccctttcacctttggcagcggcaccaaagtggaaattaaaggcggtggcggatccggcggtggcggatccggcggtggcggatccgaggtgcagctggtggagtctgggggaggcctggtcaagcctggggggtccctgagactctcctgtgcagcctctggattcaccttcagtaggtatggcatgagctgggtccgccaggctccagggaagaggctggagtgggtctcaaccattagtggcggaggcacctacatatactacccagactcagtgaagggccgattcaccatctccagagacaacgccaagaacaccctgtatctgcaaatgaacagcctgagagccgaggacacggctgtgtattactgtaccagagataactatggccgcaactatgattatggcatggattattggggccagggcaccctggtgaccgtgagcagc

SEQ ID NO: 394 - protein, 243 aa, Artificial Sequence
  HumanizeE6 scFV (VL-VH) sequence
EIVLTQSPATLSLSPGERATLTCSATSSVSYIHWYQQRPGQSPRLLIYSTSNLASGIPARFSGSGSGSDYTLTISSLEPEDFAVYYCQQRSSSPFTFGSGTKVEIKGGGGSGGGGSGGGGSEVQLVESGGGLVKPGGSLRLSCAASGFTFSRYGMSWVRQAPGKRLEWVSTISGGGTYIYYPDSVKGRFTISRDNAKNTLYLQMNSLRAEDTAVYYCTRDNYGRNYDYGMDYWGQGTLVTVSS

SEQ ID NO: 395 - DNA, 747 bp, Artificial Sequence; identical to SEQ ID NO: 238
  HumanizeC2 scFV (VH-VL) sequence

SEQ ID NO: 396 - protein, 249 aa, Artificial Sequence; identical to SEQ ID NO: 239
  HumanizeC2 scFV (VH-VL) sequence

SEQ ID NO: 397 - DNA, 747 bp, Artificial Sequence
  HumanizeE6 scFV (VL-VH) sequence
gacattgtgctgacccagtctccagcctccttggccgtgtctccaggacagagggccaccatcacctgcagagccagtaagagtgtcagtaccagcggatactcctacatgcactggtatcagcagaaaccaggacaacctcctaaactcctgatttacctggcatccaatctggagagcggggtcccagccaggttcagcggcagtgggtctgggaccgatttcaccctcacaattaatcctgtggaagctaatgatactgcaaattattactgtcagcacagtagggagctgcctttcacattcggcggagggaccaaggtggagatcaaacgaactggcggtggcggatccggcggtggcggatccggcggtggcggatccgaggtgcagctggtggagtctgggggaggcctggtcaagcctggggggtccctgagactctcctgtgcagcctctggattcaccttcagtggctatgccatgagctgggtccgccaggctccagggaaggggctggagtgggtctcaaccattagtagtggcggaacctacatatactaccccgactcagtgaagggccgattcaccatctccagagacaacgccaagaactcactgtatctgcaaatgaacagcctgagagccgaggacacggccgtgtattactgtgcgagacttgggggggataattactacgaatacttcgatgtctggggcaaagggaccacggtcaccgtctcctcc

SEQ ID NO: 398 - protein, 249 aa, Artificial Sequence
  HumanizeE6 scFV (VL-VH) sequence
DIVLTQSPASLAVSPGQRATITCRASKSVSTSGYSYMHWYQQKPGQPPKLLIYLASNLESGVPARFSGSGSGTDFTLTINPVEANDTANYYCQHSRELPFTFGGGTKVEIKRTGGGGSGGGGSGGGGSEVQLVESGGGLVKPGGSLRLSCAASGFTFSGYAMSWVRQAPGKGLEWVSTISSGGTYIYYPDSVKGRFTISRDNAKNSLYLQMNSLRAEDTAVYYCARLGGDNYYEYFDVWGKGTTVTVSS

SEQ ID NO: 399 - DNA, 15 bp, Artificial Sequence
  G4S1 linker sequence
ggcggtggcggatcc

SEQ ID NO: 400 - protein, 5 aa, Artificial Sequence
  G4S1 linker sequence
GGGGS

SEQ ID NO: 401 - DNA, 45 bp, Artificial Sequence
  [G4S1]x3 linker sequence
ggcggtggcggatccggcggtggcggatccggcggtggcggatcc

SEQ ID NO: 402 - protein, 15 aa, Artificial Sequence
  [G4S1]x3 linker sequence
GGGGSGGGGSGGGGS

SEQ ID NO: 403 - DNA, 24 bp, Artificial Sequence
  8 aa GS linker sequence
ggcggttccggcggtggatccgga

SEQ ID NO: 404 - protein, 8 aa, Artificial Sequence
  8 aa GS linker sequence
GGSGGGSG

SEQ ID NO: 405 - DNA, 39 bp, Artificial Sequence
  12 aa GS linker sequence
ggcggttccggcggtggatccggcggtggcggatccgga

SEQ ID NO: 406 - protein, 12 aa, Artificial Sequence
  12 aa GS linker sequence
GGSGGGSGGGSG

SEQ ID NO: 407 - DNA, 39 bp, Artificial Sequence
  13 aa GS linker sequence
ggcggtggatccggcggtggcggatccggcggtggatcc

SEQ ID NO: 408 - protein, 13 aa, Artificial Sequence
  13 aa GS linker sequence
GGGSGGGGSGGGS

SEQ ID NO: 409 - DNA, 66 bp, Artificial Sequence
  22 aa GS linker sequence
ggcggtggaagcggcggtggcggatccggcagcggcggaagcggcggtggcggatccggcggtgga

SEQ ID NO: 410 - protein, 22 aa, Artificial Sequence
  22 aa GS linker sequence
GGGSGGGGSGSGGSGGGGSGGG

SEQ ID NO: 411 - DNA, 78 bp, Artificial Sequence
  24 aa GS linker sequence
ggcggttccggcggtggatccggcggtggcggatccggaggcggttccggcggtggatccggcggtggcggatccgga

SEQ ID NO: 412 - protein, 24 aa, Artificial Sequence
  24 aa GS linker sequence
GGSGGGSGGGSGGGSGGGSGGGSG

SEQ ID NO: 413 - DNA, 357 bp, Artificial Sequence
  Mouse C3 Heavy chain variable region sequence
caggtccagctgcagcagtctgggcctgagctggtgaggcctggggtctcagtgaagatttcctgcaagggttccggctacagattcactgattatgctatgaactgggtgaagcagagtcatgcaaagagtctagagtggattggagttattagtactttctctggtaatacaaacttcaaccagaagtttaagggcaaggccacaatgactgtagacaaatcctccagcacagcctatatggaacttgccagattgacatctgaggattctgccatgtattactgtgcaagatcggattactacggcccatactttgactactggggccaaggcaccactctcacagtctcctca

SEQ ID NO: 414 - protein, 119 aa, Artificial Sequence
  Mouse C3 Heavy chain variable region sequence
QVQLQQSGPELVRPGVSVKISCKGSGYRFTDYAMNWVKQSHAKSLEWIGVISTFSGNTNFNQKFKGKATMTVDKSSSTAYMELARLTSEDSAMYYCARSDYYGPYFDYWGQGTTLTVSS

SEQ ID NO: 415 - DNA, 90 bp, Artificial Sequence
  Mouse C3 heavy chain variable framework region 1 (FWR1) sequence
caggtccagctgcagcagtctgggcctgagctggtgaggcctggggtctcagtgaagatttcctgcaagggttccggctacagattcact

SEQ ID NO: 416 - protein, 30 aa, Artificial Sequence
  Mouse C3 heavy chain variable framework region 1 (FWR1) sequence
QVQLQQSGPELVRPGVSVKISCKGSGYRFT

SEQ ID NO: 417 - DNA, 15 bp, Artificial Sequence
  Mouse C3 heavy chain variable complementarity determining regions 1 (CDR1) sequence
gattatgctatgaac

SEQ ID NO: 418 - protein, 5 aa, Artificial Sequence
  Mouse C3 heavy chain variable complementarity determining regions 1 (CDR1) sequence
DYAMN

SEQ ID NO: 419 - DNA, 42 bp, Artificial Sequence
  Mouse C3 heavy chain variable framework region 2 (FWR2) sequence
tgggtgaagcagagtcatgcaaagagtctagagtggattgga

SEQ ID NO: 420 - protein, 14 aa, Artificial Sequence
  Mouse C3 heavy chain variable framework region 2 (FWR2) sequence
WVKQSHAKSLEWIG

SEQ ID NO: 421 - DNA, 51 bp, Artificial Sequence
  Mouse C3 heavy chain variable complementarity determining regions 2 (CDR2) sequence
gttattagtactttctctggtaatacaaacttcaaccagaagtttaagggc

SEQ ID NO: 422 - protein, 17 aa, Artificial Sequence
  Mouse C3 heavy chain variable complementarity determining regions 2 (CDR2) sequence
VISTFSGNTNFNQKFKG

SEQ ID NO: 423 - DNA, 96 bp, Artificial Sequence
  Mouse C3 heavy chain variable framework region 3 (FWR3) acid sequence
aaggccacaatgactgtagacaaatcctccagcacagcctatatggaacttgccagattgacatctgaggattctgccatgtattactgtgcaaga

SEQ ID NO: 424 - protein, 32 aa, Artificial Sequence
  Mouse C3 heavy chain variable framework region 3 (FWR3) acid sequence
KATMTVDKSSSTAYMELARLTSEDSAMYYCAR

SEQ ID NO: 425 - DNA, 30 bp, Artificial Sequence
  Mouse C3 heavy chain variable complementarity determining regions 3 (CDR3) sequence
tcggattactacggcccatactttgactac

SEQ ID NO: 426 - protein, 10 aa, Artificial Sequence
  Mouse C3 heavy chain variable complementarity determining regions 3 (CDR3) sequence
SDYYGPYFDY

SEQ ID NO: 427 - DNA, 296 bp, Artificial Sequence
  IGHV1-18*04 heavy chain variable region sequence
caggttcagctggtgcagtctggagctgaggtgaagaagcctggggcctcagtgaaggtctcctgcaaggcttctggttacacctttaccagctacggtatcagctgggtgcgacaggcccctggacaagggcttgagtggatgggatggatcagcgcttacaatggtaacacaaactatgcacagaagctccagggcagagtcaccatgaccacagacacatccacgagcacagcctacatggagctgaggagcctgagatctgacgacacggccgtgtattactgtgcgagaga

SEQ ID NO: 428 - protein, 98 aa, Artificial Sequence
  IGHV1-18*04 heavy chain variable region sequence
QVQLVQSGAEVKKPGASVKVSCKASGYTFTSYGISWVRQAPGQGLEWMGWISAYNGNTNYAQKLQGRVTMTTDTSTSTAYMELRSLRSDDTAVYYCAR

SEQ ID NO: 429 - DNA, 90 bp, Artificial Sequence
  IGHV1-18*04 heavy chain variable framework region 1 (FWR1) sequence
caggttcagctggtgcagtctggagctgaggtgaagaagcctggggcctcagtgaaggtctcctgcaaggcttctggttacacctttacc

SEQ ID NO: 430 - protein, 30 aa, Artificial Sequence
  IGHV1-18*04 heavy chain variable framework region 1 (FWR1) sequence
QVQLVQSGAEVKKPGASVKVSCKASGYTFT

SEQ ID NO: 431 - DNA, 15 bp, Artificial Sequence
  IGHV1-18*04 heavy chain variable complementarity determining regions 1 (CDR1) sequence
agctacggtatcagc

SEQ ID NO: 432 - protein, 5 aa, Artificial Sequence
  IGHV1-18*04 heavy chain variable complementarity determining regions 1 (CDR1) sequence
SYGIS

SEQ ID NO: 433 - DNA, 42 bp, Artificial Sequence
  IGHV1-18*04 heavy chain variable framework region 2 (FWR2) sequence
tgggtgcgacaggcccctggacaagggcttgagtggatggga

SEQ ID NO: 434 - protein, 14 aa, Artificial Sequence
  IGHV1-18*04 heavy chain variable framework region 2 (FWR2) sequence
WVRQAPGQGLEWMG

SEQ ID NO: 435 - DNA, 51 bp, Artificial Sequence
  IGHV1-18*04 heavy chain variable complementarity determining regions 2 (CDR2) sequence
tggatcagcgcttacaatggtaacacaaactatgcacagaagctccagggc

SEQ ID NO: 436 - protein, 17 aa, Artificial Sequence
  IGHV1-18*04 heavy chain variable complementarity determining regions 2 (CDR2) sequence
WISAYNGNTNYAQKLQG

SEQ ID NO: 437 - DNA, 96 bp, Artificial Sequence
  IGHV1-18*04 heavy chain variable framework region 3 (FWR3) sequence
agagtcaccatgaccacagacacatccacgagcacagcctacatggagctgaggagcctgagatctgacgacacggccgtgtattactgtgcgaga

SEQ ID NO: 438 - protein, 32 aa, Artificial Sequence
  IGHV1-18*04 heavy chain variable framework region 3 (FWR3) sequence
RVTMTTDTSTSTAYMELRSLRSDDTAVYYCAR

SEQ ID NO: 439 - DNA, 357 bp, Artificial Sequence
  Humanized C3 heavy chain variable region sequence
caggttcagctggtgcagtctggagctgaggtgaagaagcctggggcctcagtgaaggtctcctgcaaggcttctggttacacctttaccgactacgccatgaactgggtgcgacaggcccctggacaagggcttgagtggatgggagtgatcagcaccttcagcggtaacacaaacttcaaccagaagttcaagggcagagtcaccatgaccacagacacatccacgagcacagcctacatggagctgaggagcctgagatctgacgacacggccgtgtattactgtgcgagaagcgactactacggcccatacttcgactactggggccagggcaccaccctgaccgtgtccagc

SEQ ID NO: 440 - protein, 119 aa, Artificial Sequence
  Humanized C3 heavy chain variable region sequence
QVQLVQSGAEVKKPGASVKVSCKASGYTFTDYAMNWVRQAPGQGLEWMGVISTFSGNTNFNQKFKGRVTMTTDTSTSTAYMELRSLRSDDTAVYYCARSDYYGPYFDYWGQGTTLTVSS

SEQ ID NO: 441 - DNA, 90 bp, Artificial Sequence; identical to SEQ ID NO: 429
  Humanized C3 heavy chain variable framework region 1 (FWR1) acid sequence

SEQ ID NO: 442 - protein, 30 aa, Artificial Sequence; identical to SEQ ID NO: 430
  Humanized C3 heavy chain variable framework region 1 (FWR1) acid sequence

SEQ ID NO: 443 - DNA, 15 bp, Artificial Sequence
  Humanized C3 heavy chain variable complementarity determining regions 1 (CDR1) sequence
gactacgccatgaac

SEQ ID NO: 444 - protein, 5 aa, Artificial Sequence
  Humanized C3 heavy chain variable complementarity determining regions 1 (CDR1) sequence
DYAMN

SEQ ID NO: 445 - DNA, 42 bp, Artificial Sequence; identical to SEQ ID NO: 433
  Humanized C3 heavy chain variable framework region 2 (FWR2) acid sequence

SEQ ID NO: 446 - protein, 14 aa, Artificial Sequence
  Humanized C3 heavy chain variable framework region 2 (FWR2) acid sequence
WVRQAPGQGLEWMG

SEQ ID NO: 447 - DNA, 51 bp, Artificial Sequence
  Humanized C3 heavy chain variable complementarity determining regions 2 (CDR2) sequence
gtgatcagcaccttcagcggtaacacaaacttcaaccagaagttcaagggc

SEQ ID NO: 448 - protein, 17 aa, Artificial Sequence
  Humanized C3 heavy chain variable complementarity determining regions 2 (CDR2) sequence
VISTFSGNTNFNQKFKG

SEQ ID NO: 449 - DNA, 96 bp, Artificial Sequence; identical to SEQ ID NO: 437
  Humanized C3 heavy chain variable framework region 3 (FWR3) acid sequence

SEQ ID NO: 450 - protein, 32 aa, Artificial Sequence; identical to SEQ ID NO: 438
  Humanized C3 heavy chain variable framework region 3 (FWR3) acid sequence

SEQ ID NO: 451 - DNA, 30 bp, Artificial Sequence
  Humanized C3 heavy chain variable complementarity determining regions 3 (CDR3) sequence
agcgactactacggcccatacttcgactac

SEQ ID NO: 452 - protein, 10 aa, Artificial Sequence
  Humanized C3 heavy chain variable complementarity determining regions 3 (CDR3) sequence
SDYYGPYFDY

SEQ ID NO: 453 - DNA, 1353 bp, Artificial Sequence
  Humanized C3 IgG1 heavy chain sequence
caggttcagctggtgcagtctggagctgaggtgaagaagcctggggcctcagtgaaggtctcctgcaaggcttctggttacacctttaccgactacgccatgaactgggtgcgacaggcccctggacaagggcttgagtggatgggagtgatcagcaccttcagcggtaacacaaacttcaaccagaagttcaagggcagagtcaccatgaccacagacacatccacgagcacagcctacatggagctgaggagcctgagatctgacgacacggccgtgtattactgtgcgagaagcgactactacggcccatacttcgactactggggccagggcaccaccctgaccgtgtccagcgctagcaccaagggcccatcggtcttccccctggcaccctcctccaagagcacctctgggggcacagcggccctgggctgcctggtcaaggactacttccccgaaccggtgacggtgtcgtggaactcaggcgccctgaccagcggcgtgcacaccttcccggctgtcctacagtcctcaggactctactccctcagcagcgtggtgacagtgccctccagcagcttgggcacccagacctacatctgcaacgtgaatcacaagcccagcaacaccaaggtggacaagaaagttgagcccaaatcttgtgacaaaactcacacatgcccaccgtgcccagcacctgaactcctggggggaccgtcagtcttcctcttccccccaaaacccaaggacaccctcatgatctcccggacccctgaggtcacatgcgtggtggtggacgtgagccacgaagaccctgaggtcaagttcaactggtacgtggacggcgtggaggtgcataatgccaagacaaagccgcgggaggagcagtacaacagcacgtaccgtgtggtcagcgtcctcaccgtcctgcaccaggactggctgaatggcaaggagtacaagtgcaaggtctccaacaaagccctcccagcccccatcgagaaaaccatctccaaagccaaagggcagccccgagaaccacaggtgtacaccctgcccccatcccgggaggagatgaccaagaaccaggtcagcctgacctgcctggtcaaaggcttctatcccagcgacatcgccgtggagtgggagagcaatgggcagccggagaacaactacaagaccacgcctcccgtgctggactccgacggctccttcttcctctacagcaagctcaccgtggacaagagcaggtggcagcaggggaacgtcttctcatgctccgtgatgcatgaggctctgcacaaccactacacgcagaagagcctctccctgtctccgggtaaatgataa

SEQ ID NO: 454 - protein, 449 aa, Artificial Sequence
  Humanized C3 IgG1 heavy chain sequence
QVQLVQSGAEVKKPGASVKVSCKASGYTFTDYAMNWVRQAPGQGLEWMGVISTFSGNTNFNQKFKGRVTMTTDTSTSTAYMELRSLRSDDTAVYYCARSDYYGPYFDYWGQGTTLTVSSASTKGPSVFPLAPSSKSTSGGTAALGCLVKDYFPEPVTVSWNSGALTSGVHTFPAVLQSSGLYSLSSVVTVPSSSLGTQTYICNVNHKPSNTKVDKKVEPKSCDKTHTCPPCPAPELLGGPSVFLFPPKPKDTLMISRTPEVTCVVVDVSHEDPEVKFNWYVDGVEVHNAKTKPREEQYNSTYRVVSVLTVLHQDWLNGKEYKCKVSNKALPAPIEKTISKAKGQPREPQVYTLPPSREEMTKNQVSLTCLVKGFYPSDIAVEWESNGQPENNYKTTPPVLDSDGSFFLYSKLTVDKSRWQQGNVFSCSVMHEALHNHYTQKSLSLSPGK

SEQ ID NO: 455 - DNA, 1341 bp, Artificial Sequence
  Humanized C3 IgG2 heavy chain sequence
caggttcagctggtgcagtctggagctgaggtgaagaagcctggggcctcagtgaaggtctcctgcaaggcttctggttacacctttaccgactacgccatgaactgggtgcgacaggcccctggacaagggcttgagtggatgggagtgatcagcaccttcagcggtaacacaaacttcaaccagaagttcaagggcagagtcaccatgaccacagacacatccacgagcacagcctacatggagctgaggagcctgagatctgacgacacggccgtgtattactgtgcgagaagcgactactacggcccatacttcgactactggggccagggcaccaccctgaccgtgtccagcgcctccaccaagggcccatcggtcttccccctggcgccctgctccaggagcacctccgagagcacagccgccctgggctgcctggtcaaggactacttccccgaaccggtgacggtgtcgtggaactcaggcgctctgaccagcggcgtgcacaccttcccagctgtcctacagtcctcaggactctactccctcagcagcgtggtgaccgtgccctccagcaacttcggcacccagacctacacctgcaacgtagatcacaagcccagcaacaccaaggtggacaagacagttgagcgcaaatgttgtgtcgagtgcccaccgtgcccagcaccacctgtggcaggaccgtcagtcttcctcttccccccaaaacccaaggacaccctcatgatctcccggacccctgaggtcacgtgcgtggtggtggacgtgagccacgaagaccccgaggtccagttcaactggtacgtggacggcgtggaggtgcataatgccaagacaaagccacgggaggagcagttcaacagcacgttccgtgtggtcagcgtcctcaccgttgtgcaccaggactggctgaacggcaaggagtacaagtgcaaggtctccaacaaaggcctcccagcccccatcgagaaaaccatctccaaaaccaaagggcagccccgagaaccacaggtgtacaccctgcccccatcccgggaggagatgaccaagaaccaggtcagcctgacctgcctggtcaaaggcttctaccccagcgacatcgccgtggagtgggagagcaatgggcagccggagaacaactacaagaccacacctcccatgctggactccgacggctccttcttcctctacagcaagctcaccgtggacaagagcaggtggcagcaggggaacgtcttctcatgctccgtgatgcatgaggctctgcacaaccactacacgcagaagagcctctccctgtctccgggtaaatagtaa

SEQ ID NO: 456 - protein, 445 aa, Artificial Sequence
  Humanized C3 IgG2 heavy chain sequence
QVQLVQSGAEVKKPGASVKVSCKASGYTFTDYAMNWVRQAPGQGLEWMGVISTFSGNTNFNQKFKGRVTMTTDTSTSTAYMELRSLRSDDTAVYYCARSDYYGPYFDYWGQGTTLTVSSASTKGPSVFPLAPCSRSTSESTAALGCLVKDYFPEPVTVSWNSGALTSGVHTFPAVLQSSGLYSLSSVVTVPSSNFGTQTYTCNVDHKPSNTKVDKTVERKCCVECPPCPAPPVAGPSVFLFPPKPKDTLMISRTPEVTCVVVDVSHEDPEVQFNWYVDGVEVHNAKTKPREEQFNSTFRVVSVLTVVHQDWLNGKEYKCKVSNKGLPAPIEKTISKTKGQPREPQVYTLPPSREEMTKNQVSLTCLVKGFYPSDIAVEWESNGQPENNYKTTPPMLDSDGSFFLYSKLTVDKSRWQQGNVFSCSVMHEALHNHYTQKSLSLSPGK

SEQ ID NO: 457 - DNA, 545 bp, Artificial Sequence
  Humanized C3 heavy chain IgG1 gBLOCK sequence
tgctctgggttccaggttccactggtgacgcggcccagccggcccaggttcagctggtgcagtctggagctgaggtgaagaagcctggggcctcagtgaaggtctcctgcaaggcttctggttacacctttaccgactacgccatgaactgggtgcgacaggcccctggacaagggcttgagtggatgggagtgatcagcaccttcagcggtaacacaaacttcaaccagaagttcaagggcagagtcaccatgaccacagacacatccacgagcacagcctacatggagctgaggagcctgagatctgacgacacggccgtgtattactgtgcgagaagcgactactacggcccatacttcgactactggggccagggcaccaccctgaccgtgtccagcgctagcaccaagggcccatcggtcttccccctggcaccctcctccaagagcacctctgggggcacagcggccctgggctgcctggtcaaggactacttccccgaaccggtgacggtgtcgtggaactcaggcgccctgaccagc

SEQ ID NO: 458 - DNA, 336 bp, Artificial Sequence
  Mouse C3 Light Chain variable region sequence
gatgttttgatgacccaaactccactctccctgcctgtcagtcttggagatcaagcctccatctcttgcagatctagtcagaccattgtacatagtaatggaaacacctatttagaatggtacctgcagaaaccaggccagtctccaaagctcctgatctacaaagtttccaaccgattttctggggtcccagacaggttcagtggcagtggatcagggacagatttcacactcaagatcaacagagtggaggctgaggatctgggagtttattactgctttcaaggttcacatgttccattcacgttcggctcggggacaaagttggaaataaaa

SEQ ID NO: 459 - protein, 112 aa, Artificial Sequence
  Mouse C3 Light Chain variable region sequence
DVLMTQTPLSLPVSLGDQASISCRSSQTIVHSNGNTYLEWYLQKPGQSPKLLIYKVSNRFSGVPDRFSGSGSGTDFTLKINRVEAEDLGVYYCFQGSHVPFTFGSGTKLEIK

SEQ ID NO: 460 - DNA, 69 bp, Artificial Sequence
  Mouse C3 light chain variable framework region 1 (FWR1) sequence
gatgttttgatgacccaaactccactctccctgcctgtcagtcttggagatcaagcctccatctcttgc

SEQ ID NO: 461 - protein, 23 aa, Artificial Sequence
  Mouse C3 light chain variable framework region 1 (FWR1) sequence
DVLMTQTPLSLPVSLGDQASISC

SEQ ID NO: 462 - DNA, 48 bp, Artificial Sequence
  Mouse C3 light chain variable complementarity determining regions 1 (CDR1) sequence
agatctagtcagaccattgtacatagtaatggaaacacctatttagaa

SEQ ID NO: 463 - protein, 16 aa, Artificial Sequence
  Mouse C3 light chain variable complementarity determining regions 1 (CDR1) sequence
RSSQTIVHSNGNTYLE

SEQ ID NO: 464 - DNA, 45 bp, Artificial Sequence
  Mouse C3 light chain variable framework region 2 (FWR2) sequence
tggtacctgcagaaaccaggccagtctccaaagctcctgatctac

SEQ ID NO: 465 - protein, 15 aa, Artificial Sequence
  Mouse C3 light chain variable framework region 2 (FWR2) sequence
WYLQKPGQSPKLLIY

SEQ ID NO: 466 - DNA, 21 bp, Artificial Sequence
  Mouse C3 light chain variable complementarity determining regions 2 (CDR2) sequence
aaagtttccaaccgattttct

SEQ ID NO: 467 - protein, 7 aa, Artificial Sequence
  Mouse C3 light chain variable complementarity determining regions 2 (CDR2) sequence
KVSNRFS

SEQ ID NO: 468 - DNA, 96 bp, Artificial Sequence
  Mouse C3 light chain variable framework region 3 (FWR3) sequence
ggggtcccagacaggttcagtggcagtggatcagggacagatttcacactcaagatcaacagagtggaggctgaggatctgggagtttattactgc

SEQ ID NO: 469 - protein, 32 aa, Artificial Sequence
  Mouse C3 light chain variable framework region 3 (FWR3) sequence
GVPDRFSGSGSGTDFTLKINRVEAEDLGVYYC

SEQ ID NO: 470 - DNA, 27 bp, Artificial Sequence
  Mouse C3 light chain variable complementarity determining regions 3 (CDR3) sequence
tttcaaggttcacatgttccattcacg

SEQ ID NO: 471 - protein, 9 aa, Artificial Sequence
  Mouse C3 light chain variable complementarity determining regions 3 (CDR3) sequence
FQGSHVPFT

SEQ ID NO: 472 - DNA, 300 bp, Artificial Sequence
  IGKV2-29*03 light chain variable region sequence
gatattgtgatgacccagactccactctctctgtccgtcacccctggacagccggcctccatctcctgcaagtctagtcagagcctcctgcatagtgatggaaagacctatttgtattggtacctgcagaagccaggccagtctccacagctcctgatctatgaagtttccagccggttctctggagtgccagataggttcagtggcagcgggtcagggacagatttcacactgaaaatcagccgggtggaggctgaggatgttggggtttattactgcatgcaaggtatacaccttcct

SEQ ID NO: 473 - protein, 100 aa, Artificial Sequence
  IGKV2-29*03 light chain variable region sequence
DIVMTQTPLSLSVTPGQPASISCKSSQSLLHSDGKTYLYWYLQKPGQSPQLLIYEVSSRFSGVPDRFSGSGSGTDFTLKISRVEAEDVGVYYCMQGIHLP

SEQ ID NO: 474 - DNA, 69 bp, Artificial Sequence
  IGKV2-29*03 light chain variable framework region 1 (FWR1) acid sequence
gatattgtgatgacccagactccactctctctgtccgtcacccctggacagccggcctccatctcctgc

SEQ ID NO: 475 - protein, 23 aa, Artificial Sequence
  IGKV2-29*03 light chain variable framework region 1 (FWR1) acid sequence
DIVMTQTPLSLSVTPGQPASISC

SEQ ID NO: 476 - DNA, 49 bp, Artificial Sequence
  IGKV2-29*03 light chain variable complementarity determining regions 1 (CDR1) sequence
aagtctagtcagagcctcctgcatagtgatggaaagacctatttsgtat

SEQ ID NO: 477 - protein, 16 aa, Artificial Sequence
  IGKV2-29*03 light chain variable complementarity determining regions 1 (CDR1) sequence
KSSQSLLHSDGKTYLY

SEQ ID NO: 478 - DNA, 45 bp, Artificial Sequence
  IGKV2-29*03 light chain variable framework region 2 (FWR2) sequence
tggtacctgcagaagccaggccagtctccacagctcctgatctat

SEQ ID NO: 479 - protein, 15 aa, Artificial Sequence
  IGKV2-29*03 light chain variable framework region 2 (FWR2) sequence
WYLQKPGQSPQLLIY

SEQ ID NO: 480 - DNA, 18 bp, Artificial Sequence
  IGKV2-29*03 light chain variable complementarity determining regions 2 (CDR2) sequence
gaagtttccagccggttc

SEQ ID NO: 481 - protein, 7 aa, Artificial Sequence
  IGKV2-29*03 light chain variable complementarity determining regions 2 (CDR2) sequence
EVSSRFS

SEQ ID NO: 482 - DNA, 96 bp, Artificial Sequence
  IGKV2-29*03 light chain variable framework region 3 (FWR3) sequence
ggagtgccagataggttcagtggcagcgggtcagggacagatttcacactgaaaatcagccgggtggaggctgaggatgttggggtttattactgc

SEQ ID NO: 483 - protein, 32 aa, Artificial Sequence
  IGKV2-29*03 light chain variable framework region 3 (FWR3) sequence
GVPDRFSGSGSGTDFTLKISRVEAEDVGVYYC

SEQ ID NO: 484 - DNA, 21 bp, Artificial Sequence
  IGKV2-29*03 light chain variable complementarity determining regions3 (CDR3) sequence
atgcaaggtatacaccttcct

SEQ ID NO: 485 - protein, 7 aa, Artificial Sequence
  IGKV2-29*03 light chain variable complementarity determining regions3 (CDR3) sequence
MQGIHLP

SEQ ID NO: 486 - DNA, 342 bp, Artificial Sequence
  Humanized C3 light chain variable region sequence
gatattgtgatgacccagactccactctctctgtccgtcacccctggacagccggcctccatctcctgcaggtctagtcagaccattgtccatagtaatggaaacacctatttggagtggtacctgcagaagccaggccagtctccacagctcctgatctataaggtttccaaccggttctctggagtgccagataggttcagtggcagcgggtcagggacagatttcacactgaaaatcagccgggtggaggctgaggatgttggggtttattactgcttccaaggtagccacgtgcctttcaccttcggcggagggaccaaggtggagatcaaacgaact

SEQ ID NO: 487 - protein, 114 aa, Artificial Sequence
  Humanized C3 light chain variable region sequence
DIVMTQTPLSLSVTPGQPASISCRSSQTIVHSNGNTYLEWYLQKPGQSPQLLIYKVSNRFSGVPDRFSGSGSGTDFTLKISRVEAEDVGVYYCFQGSHVPFTFGGGTKVEIKRT

SEQ ID NO: 488 - DNA, 69 bp, Artificial Sequence; identical to SEQ ID NO: 474
  Humanized C3 light chain variable framework region 1 (FWR1) acid sequence

SEQ ID NO: 489 - protein, 23 aa, Artificial Sequence
  Humanized C3 light chain variable framework region 1 (FWR1) acid sequence
DIVMTQTPLSLSVTPGQPASISC

SEQ ID NO: 490 - DNA, 47 bp, Artificial Sequence
  Humanized C3 light chain variable complementarity determining regions 1 (CDR1) sequence
ggtctagtcagaccattgtccatagtaatggaaacacctatttggag

SEQ ID NO: 491 - protein, 16 aa, Artificial Sequence
  Humanized C3 light chain variable complementarity determining regions 1 (CDR1) sequence
RSSQTIVHSNGNTYLE

SEQ ID NO: 492 - DNA, 45 bp, Artificial Sequence; identical to SEQ ID NO: 478
  Humanized C3 light chain variable framework region 2 (FWR2) acid sequence

SEQ ID NO: 493 - protein, 15 aa, Artificial Sequence
  Humanized C3 light chain variable framework region 2 (FWR2) acid sequence
WYLQKPGQSPQLLIY

SEQ ID NO: 494 - DNA, 21 bp, Artificial Sequence
  Humanized C3 light chain variable complementarity determining regions 2 (CDR2) sequence
aaggtttccaaccggttctct

SEQ ID NO: 495 - protein, 7 aa, Artificial Sequence
  Humanized C3 light chain variable complementarity determining regions 2 (CDR2) sequence
KVSNRFS

SEQ ID NO: 496 - DNA, 96 bp, Artificial Sequence; identical to SEQ ID NO: 482
  Humanized C3 light chain variable framework region 3 (FWR3) acid sequence

SEQ ID NO: 497 - protein, 32 aa, Artificial Sequence; identical to SEQ ID NO: 483
  Humanized C3 light chain variable framework region 3 (FWR3) acid sequence

SEQ ID NO: 498 - DNA, 27 bp, Artificial Sequence
  Humanized C3 light chain variable complementarity determining regions 3 (CDR3) sequence
ttccaaggtagccacgtgcctttcacc

SEQ ID NO: 499 - protein, 9 aa, Artificial Sequence
  Humanized C3 light chain variable complementarity determining regions 3 (CDR3) sequence
FQGSHVPFT

SEQ ID NO: 500 - DNA, 666 bp, Artificial Sequence
  Humanized C3 lambda light chain  sequence
gatattgtgatgacccagactccactctctctgtccgtcacccctggacagccggcctccatctcctgcaggtctagtcagaccattgtccatagtaatggaaacacctatttggagtggtacctgcagaagccaggccagtctccacagctcctgatctataaggtttccaaccggttctctggagtgccagataggttcagtggcagcgggtcagggacagatttcacactgaaaatcagccgggtggaggctgaggatgttggggtttattactgcttccaaggtagccacgtgcctttcaccttcggcggagggaccaaggtggagatcaaacgaactggtcagcccaaggctgccccctcggtcactctgttcccgccctcctctgaggagcttcaagccaacaaggccacactggtgtgtctcataagtgacttctacccgggagccgtgacagtggcctggaaggcagatagcagccccgtcaaggcgggagtggagaccaccacaccctccaaacaaagcaacaacaagtacgcggccagcagctatctgagcctgacgcctgagcagtggaagtcccacagaagctacagctgccaggtcacgcatgaagggagcaccgtggagaagacagtggcccctacagaatgttcatagtaa

SEQ ID NO: 501 - protein, 220 aa, Artificial Sequence
  Humanized C3 lambda light chain  sequence
DIVMTQTPLSLSVTPGQPASISCRSSQTIVHSNGNTYLEWYLQKPGQSPQLLIYKVSNRFSGVPDRFSGSGSGTDFTLKISRVEAEDVGVYYCFQGSHVPFTFGGGTKVEIKRTGQPKAAPSVTLFPPSSEELQANKATLVCLISDFYPGAVTVAWKADSSPVKAGVETTTPSKQSNNKYAASSYLSLTPEQWKSHRSYSCQVTHEGSTVEKTVAPTECS

SEQ ID NO: 502 - DNA, 666 bp, Artificial Sequence
  Humanized C3 Kappa light chain
gatattgtgatgacccagactccactctctctgtccgtcacccctggacagccggcctccatctcctgcaggtctagtcagaccattgtccatagtaatggaaacacctatttggagtggtacctgcagaagccaggccagtctccacagctcctgatctataaggtttccaaccggttctctggagtgccagataggttcagtggcagcgggtcagggacagatttcacactgaaaatcagccgggtggaggctgaggatgttggggtttattactgcttccaaggtagccacgtgcctttcaccttcggcggagggaccaaggtggagatcaaacgaactacggtggctgcaccatctgtcttcatcttcccgccatctgatgagcagttgaaatctggaactgcctctgttgtgtgcctgctgaataacttctatcccagagaggccaaagtacagtggaaggtggataacgccctccaatcgggtaactcccaggagagtgtcacagagcaggacagcaaggacagcacctacagcctcagcagcaccctgacgctgagcaaagcagactacgagaaacacaaagtctacgcctgcgaagtcacccatcagggcctgagctcgcccgtcacaaagagcttcaacaggggagagtgttagtaa

SEQ ID NO: 503 - protein, 220 aa, Artificial Sequence
  Humanized C3 Kappa light chain
DIVMTQTPLSLSVTPGQPASISCRSSQTIVHSNGNTYLEWYLQKPGQSPQLLIYKVSNRFSGVPDRFSGSGSGTDFTLKISRVEAEDVGVYYCFQGSHVPFTFGGGTKVEIKRTTVAAPSVFIFPPSDEQLKSGTASVVCLLNNFYPREAKVQWKVDNALQSGNSQESVTEQDSKDSTYSLSSTLTLSKADYEKHKVYACEVTHQGLSSPVTKSFNRGEC

SEQ ID NO: 504 - DNA, 815 bp, Artificial Sequence
  Humanized C3 Kappa light gBLOCK sequence
agctggctaggtaagcttggtaccgagctcggatccacgccaccatggagacagacacactcctgctatgggtactgctgctctgggttccaggttccactggtgacgatattgtgatgacccagactccactctctctgtccgtcacccctggacagccggcctccatctcctgcaggtctagtcagaccattgtccatagtaatggaaacacctatttggagtggtacctgcagaagccaggccagtctccacagctcctgatctataaggtttccaaccggttctctggagtgccagataggttcagtggcagcgggtcagggacagatttcacactgaaaatcagccgggtggaggctgaggatgttggggtttattactgcttccaaggtagccacgtgcctttcaccttcggcggagggaccaaggtggagatcaaacgaactacggtggctgcaccatctgtcttcatcttcccgccatctgatgagcagttgaaatctggaactgcctctgttgtgtgcctgctgaataacttctatcccagagaggccaaagtacagtggaaggtggataacgccctccaatcgggtaactcccaggagagtgtcacagagcaggacagcaaggacagcacctacagcctcagcagcaccctgacgctgagcaaagcagactacgagaaacacaaagtctacgcctgcgaagtcacccatcagggcctgagctcgcccgtcacaaagagcttcaacaggggagagtgttagtaagtttaaacccgctgatcagcctcgactgtgccttctagttgc

SEQ ID NO: 505 - DNA, 321 bp, Artificial Sequence
  Mouse C8 heavy chain variable region sequence
gaagtgatggtcgtggaaagcggcggtggtctggtaaagccggggggatcccttaagctttcttgcgccgcatccgggttcacgttctccggctatgccatgtcctgggtccgacagactcccgaaaagcgcttggaatgggtggccactatctcctccggggggacgtacatctactaccccgacagtgtgaaaggaagatttacaatatctcgcgacaacgcaaaaaataccttgtatcttcaaatgagctccctgcggtcagaggacactgccatgtactattgcgcccgcctgggcggcgacaattactatgagtat

SEQ ID NO: 506 - protein, 107 aa, Artificial Sequence
  Mouse C8 heavy chain variable region sequence
EVMVVESGGGLVKPGGSLKLSCAASGFTFSGYAMSWVRQTPEKRLEWVATISSGGTYIYYPDSVKGRFTISRDNAKNTLYLQMSSLRSEDTAMYYCARLGGDNYYEY

SEQ ID NO: 507 - DNA, 15 bp, Artificial Sequence
  Mouse C8 heavy chain variable complementarity determining region 1 (CDR1) sequence
ggctatgccatgtcc

SEQ ID NO: 508 - protein, 5 aa, Artificial Sequence
  Mouse C8 heavy chain variable complementarity determining region 1 (CDR1) sequence
GYAMS

SEQ ID NO: 509 - DNA, 51 bp, Artificial Sequence
  Mouse C8 heavy chain variable complementarity determining region 2 (CDR2) sequence
actatctcctccggggggacgtacatctactaccccgacagtgtgaaagga

SEQ ID NO: 510 - protein, 17 aa, Artificial Sequence
  Mouse C8 heavy chain variable complementarity determining region 2 (CDR2) sequence
TISSGGTYIYYPDSVKG

SEQ ID NO: 511 - DNA, 27 bp, Artificial Sequence
  Mouse C8 heavy chain variable complementarity determining region 3 (CDR3) sequence
ctgggcggcgacaattactatgagtat

SEQ ID NO: 512 - protein, 9 aa, Artificial Sequence
  Mouse C8 heavy chain variable complementarity determining region 3 (CDR3) sequence
LGGDNYYEY

SEQ ID NO: 513 - DNA, 292 bp, Artificial Sequence
  IGHV3-21*04 heavy chain variable region sequence
gaggtgcagctggtggagtctgggggaggcctggtcaagcctggggggtccctgagactctcctgtgcagcctctggattcaccttcagtagctatagcatgaactgggtccgccaggctccagggaaggggctggagtgggtctcatccattagtagtagtagtagttacatatactacgcagactcagtgaagggccgattcaccatctccagagacaacgccaagaactcactgtatctgcaaatgaacagcctgagagccgaggacacggccgtgtattactgtgcga

SEQ ID NO: 514 - protein, 98 aa, Artificial Sequence; identical to SEQ ID NO: 27
  IGHV3-21*04 heavy chain variable region sequence

SEQ ID NO: 515 - DNA, 90 bp, Artificial Sequence; identical to SEQ ID NO: 28
  IGHV3-21*04 heavy chain variable framework region 1 (FWR1) sequence

SEQ ID NO: 516 - protein, 30 aa, Artificial Sequence; identical to SEQ ID NO: 29
  IGHV3-21*04 heavy chain variable framework region 1 (FWR1) sequence

SEQ ID NO: 517 - DNA, 15 bp, Artificial Sequence
  IGHV3-21*04 heavy chain variable complementarity determining regions 1 (CDR1) sequence
agctatagcatgaac

SEQ ID NO: 518 - protein, 5 aa, Artificial Sequence
  IGHV3-21*04 heavy chain variable complementarity determining regions 1 (CDR1) sequence
SYSMN

SEQ ID NO: 519 - DNA, 39 bp, Artificial Sequence
  IGHV3-21*04 heavy chain variable framework region 2 (FWR2) sequence
tgggtccgccaggctccagggaaggggctggagtgggtc

SEQ ID NO: 520 - protein, 13 aa, Artificial Sequence
  IGHV3-21*04 heavy chain variable framework region 2 (FWR2) sequence
WVRQAPGKGLEWV

SEQ ID NO: 521 - DNA, 54 bp, Artificial Sequence
  IGHV3-21*04 heavy chain variable complementarity determining regions 2 (CDR2) sequence
tcatccattagtagtagtagtagttacatatactacgcagactcagtgaagggc

SEQ ID NO: 522 - protein, 18 aa, Artificial Sequence
  IGHV3-21*04 heavy chain variable complementarity determining regions 2 (CDR2) sequence
SSISSSSSYIYYADSVKG

SEQ ID NO: 523 - DNA, 94 bp, Artificial Sequence
  IGHV3-21*04 heavy chain variable framework region 3 (FWR3) sequence
cgattcaccatctccagagacaacgccaagaactcactgtatctgcaaatgaacagcctgagagccgaggacacggccgtgtattactgtgcga

SEQ ID NO: 524 - protein, 32 aa, Artificial Sequence; identical to SEQ ID NO: 37
  IGHV3-21*04 heavy chain variable framework region 3 (FWR3) sequence

SEQ ID NO: 525 - DNA, 354 bp, Artificial Sequence
  Humanized C8 heavy chain variable region sequence
gaggtgcagctggtggagtctgggggaggcctggtcaagcctggggggtccctgagactctcctgtgcagcctctggattcaccttcagtggctatgccatgagctgggtccgccaggctccagggaaggggctggagtgggtctcaaccattagtagtggcggaacctacatatactaccctgactcagtgaagggccgattcaccatctccagagacaacgccaagaactcactgtatctgcaaatgaacagcctgagagccgaggacacggccgtgtattactgtgcgagactgggcggcgataactattatgaatattggggcaaagggaccacggtcaccgtctcctcc

SEQ ID NO: 526 - protein, 118 aa, Artificial Sequence
  Humanized C8 heavy chain variable region sequence
EVQLVESGGGLVKPGGSLRLSCAASGFTFSGYAMSWVRQAPGKGLEWVSTISSGGTYIYYPDSVKGRFTISRDNAKNSLYLQMNSLRAEDTAVYYCARLGGDNYYEYWGKGTTVTVSS

SEQ ID NO: 527 - DNA, 90 bp, Artificial Sequence; identical to SEQ ID NO: 28
  Humanized C8 heavy chain variable framework region 1 (FWR1) sequence

SEQ ID NO: 528 - protein, 30 aa, Artificial Sequence; identical to SEQ ID NO: 29
  Humanized C8 heavy chain variable framework region 1 (FWR1) sequence

SEQ ID NO: 529 - DNA, 15 bp, Artificial Sequence
  Humanized C8 heavy chain variable complementarity determining region 1 (CDR1) sequence
ggctatgccatgagc

SEQ ID NO: 530 - protein, 5 aa, Artificial Sequence
  Humanized C8 heavy chain variable complementarity determining region 1 (CDR1) sequence
GYAMS

SEQ ID NO: 531 - DNA, 42 bp, Artificial Sequence; identical to SEQ ID NO: 32
  Humanized C8 heavy chain variable framework region 2 (FWR2) sequence

SEQ ID NO: 532 - protein, 14 aa, Artificial Sequence
  Humanized C8 heavy chain variable framework region 2 (FWR2) sequence
WVRQAPGKGLEWVS

SEQ ID NO: 533 - DNA, 51 bp, Artificial Sequence
  Humanized C8 heavy chain variable complementarity determining region 2 (CDR2) sequence
accattagtagtggcggaacctacatatactaccctgactcagtgaagggc

SEQ ID NO: 534 - protein, 17 aa, Artificial Sequence
  Humanized C8 heavy chain variable complementarity determining region 2 (CDR2) sequence
TISSGGTYIYYPDSVKG

SEQ ID NO: 535 - DNA, 96 bp, Artificial Sequence; identical to SEQ ID NO: 142
  Humanized C8 heavy chain variable framework region 3 (FWR3) sequence

SEQ ID NO: 536 - protein, 32 aa, Artificial Sequence; identical to SEQ ID NO: 37
  Humanized C8 heavy chain variable framework region 3 (FWR3) sequence

SEQ ID NO: 537 - DNA, 27 bp, Artificial Sequence
  Humanized C8 heavy chain variable complementarity determining region 3 (CDR3) sequence
ctgggcggcgataactattatgaatat

SEQ ID NO: 538 - protein, 9 aa, Artificial Sequence
  Humanized C8 heavy chain variable complementarity determining region 3 (CDR3) sequence
LGGDNYYEY

SEQ ID NO: 539 - DNA, 1350 bp, Artificial Sequence
  Humanized C8 IgG1 heavy chain sequence
gaggtgcagctggtggagtctgggggaggcctggtcaagcctggggggtccctgagactctcctgtgcagcctctggattcaccttcagtggctatgccatgagctgggtccgccaggctccagggaaggggctggagtgggtctcaaccattagtagtggcggaacctacatatactaccctgactcagtgaagggccgattcaccatctccagagacaacgccaagaactcactgtatctgcaaatgaacagcctgagagccgaggacacggccgtgtattactgtgcgagactgggcggcgataactattatgaatattggggcaaagggaccacggtcaccgtctcctccgctagcaccaagggcccatcggtcttccccctggcaccctcctccaagagcacctctgggggcacagcggccctgggctgcctggtcaaggactacttccccgaaccggtgacggtgtcgtggaactcaggcgccctgaccagcggcgtgcacaccttcccggctgtcctacagtcctcaggactctactccctcagcagcgtggtgacagtgccctccagcagcttgggcacccagacctacatctgcaacgtgaatcacaagcccagcaacaccaaggtggacaagaaagttgagcccaaatcttgtgacaaaactcacacatgcccaccgtgcccagcacctgaactcctggggggaccgtcagtcttcctcttccccccaaaacccaaggacaccctcatgatctcccggacccctgaggtcacatgcgtggtggtggacgtgagccacgaagaccctgaggtcaagttcaactggtacgtggacggcgtggaggtgcataatgccaagacaaagccgcgggaggagcagtacaacagcacgtaccgtgtggtcagcgtcctcaccgtcctgcaccaggactggctgaatggcaaggagtacaagtgcaaggtctccaacaaagccctcccagcccccatcgagaaaaccatctccaaagccaaagggcagccccgagaaccacaggtgtacaccctgcccccatcccgggaggagatgaccaagaaccaggtcagcctgacctgcctggtcaaaggcttctatcccagcgacatcgccgtggagtgggagagcaatgggcagccggagaacaactacaagaccacgcctcccgtgctggactccgacggctccttcttcctctacagcaagctcaccgtggacaagagcaggtggcagcaggggaacgtcttctcatgctccgtgatgcatgaggctctgcacaaccactacacgcagaagagcctctccctgtctccgggtaaatgataa

SEQ ID NO: 540 - protein, 448 aa, Artificial Sequence
  Humanized C8 IgG1 heavy chain sequence
EVQLVESGGGLVKPGGSLRLSCAASGFTFSGYAMSWVRQAPGKGLEWVSTISSGGTYIYYPDSVKGRFTISRDNAKNSLYLQMNSLRAEDTAVYYCARLGGDNYYEYWGKGTTVTVSSASTKGPSVFPLAPSSKSTSGGTAALGCLVKDYFPEPVTVSWNSGALTSGVHTFPAVLQSSGLYSLSSVVTVPSSSLGTQTYICNVNHKPSNTKVDKKVEPKSCDKTHTCPPCPAPELLGGPSVFLFPPKPKDTLMISRTPEVTCVVVDVSHEDPEVKFNWYVDGVEVHNAKTKPREEQYNSTYRVVSVLTVLHQDWLNGKEYKCKVSNKALPAPIEKTISKAKGQPREPQVYTLPPSREEMTKNQVSLTCLVKGFYPSDIAVEWESNGQPENNYKTTPPVLDSDGSFFLYSKLTVDKSRWQQGNVFSCSVMHEALHNHYTQKSLSLSPGK

SEQ ID NO: 541 - DNA, 1338 bp, Artificial Sequence
  Humanized C8 IgG2 heavy chain sequence
gaggtgcagctggtggagtctgggggaggcctggtcaagcctggggggtccctgagactctcctgtgcagcctctggattcaccttcagtggctatgccatgagctgggtccgccaggctccagggaaggggctggagtgggtctcaaccattagtagtggcggaacctacatatactaccctgactcagtgaagggccgattcaccatctccagagacaacgccaagaactcactgtatctgcaaatgaacagcctgagagccgaggacacggccgtgtattactgtgcgagactgggcggcgataactattatgaatattggggcaaagggaccacggtcaccgtctcctccgcctccaccaagggcccatcggtcttccccctggcgccctgctccaggagcacctccgagagcacagccgccctgggctgcctggtcaaggactacttccccgaaccggtgacggtgtcgtggaactcaggcgctctgaccagcggcgtgcacaccttcccagctgtcctacagtcctcaggactctactccctcagcagcgtggtgaccgtgccctccagcaacttcggcacccagacctacacctgcaacgtagatcacaagcccagcaacaccaaggtggacaagacagttgagcgcaaatgttgtgtcgagtgcccaccgtgcccagcaccacctgtggcaggaccgtcagtcttcctcttccccccaaaacccaaggacaccctcatgatctcccggacccctgaggtcacgtgcgtggtggtggacgtgagccacgaagaccccgaggtccagttcaactggtacgtggacggcgtggaggtgcataatgccaagacaaagccacgggaggagcagttcaacagcacgttccgtgtggtcagcgtcctcaccgttgtgcaccaggactggctgaacggcaaggagtacaagtgcaaggtctccaacaaaggcctcccagcccccatcgagaaaaccatctccaaaaccaaagggcagccccgagaaccacaggtgtacaccctgcccccatcccgggaggagatgaccaagaaccaggtcagcctgacctgcctggtcaaaggcttctaccccagcgacatcgccgtggagtgggagagcaatgggcagccggagaacaactacaagaccacacctcccatgctggactccgacggctccttcttcctctacagcaagctcaccgtggacaagagcaggtggcagcaggggaacgtcttctcatgctccgtgatgcatgaggctctgcacaaccactacacgcagaagagcctctccctgtctccgggtaaatagtaa

SEQ ID NO: 542 - protein, 444 aa, Artificial Sequence
  Humanized C8 IgG2 heavy chain sequence
EVQLVESGGGLVKPGGSLRLSCAASGFTFSGYAMSWVRQAPGKGLEWVSTISSGGTYIYYPDSVKGRFTISRDNAKNSLYLQMNSLRAEDTAVYYCARLGGDNYYEYWGKGTTVTVSSASTKGPSVFPLAPCSRSTSESTAALGCLVKDYFPEPVTVSWNSGALTSGVHTFPAVLQSSGLYSLSSVVTVPSSNFGTQTYTCNVDHKPSNTKVDKTVERKCCVECPPCPAPPVAGPSVFLFPPKPKDTLMISRTPEVTCVVVDVSHEDPEVQFNWYVDGVEVHNAKTKPREEQFNSTFRVVSVLTVVHQDWLNGKEYKCKVSNKGLPAPIEKTISKTKGQPREPQVYTLPPSREEMTKNQVSLTCLVKGFYPSDIAVEWESNGQPENNYKTTPPMLDSDGSFFLYSKLTVDKSRWQQGNVFSCSVMHEALHNHYTQKSLSLSPGK

SEQ ID NO: 543 - DNA, 306 bp, Artificial Sequence
  Mouse C8 light chain variable region sequence
gacatcgtcattacgcagacccctgccagtcttgccgtttctctgggccagagggccactatcagttacagggcgagtaagtctgtgagtaccagcggctatagttacatgcattggaaccagcagaaaccgggacagccaccacgcctgcttatttatctggtgtctaatcttgagtccggggtgcccgccaggttcagcggcagcggctctgggaccgacttcacactcaacattcatccagtggaagaagaggacgctgctacatactactgtcaacacattcgggaactgaccaggagtgaa

SEQ ID NO: 544 - protein, 102 aa, Artificial Sequence
  Mouse C8 light chain variable region sequence
DIVITQTPASLAVSLGQRATISYRASKSVSTSGYSYMHWNQQKPGQPPRLLIYLVSNLESGVPARFSGSGSGTDFTLNIHPVEEEDAATYYCQHIRELTRSE

SEQ ID NO: 545 - DNA, 45 bp, Artificial Sequence
  Mouse C8 light chain variable complementarity determining region 1 (CDR1) sequence
agggcgagtaagtctgtgagtaccagcggctatagttacatgcat

SEQ ID NO: 546 - protein, 15 aa, Artificial Sequence
  Mouse C8 light chain variable complementarity determining region 1 (CDR1) sequence
RASKSVSTSGYSYMH

SEQ ID NO: 547 - DNA, 21 bp, Artificial Sequence
  Mouse C8 light chain variable complementarity determining region 2 (CDR2) sequence
ctggtgtctaatcttgagtcc

SEQ ID NO: 548 - protein, 7 aa, Artificial Sequence
  Mouse C8 light chain variable complementarity determining region 2 (CDR2) sequence
LVSNLES

SEQ ID NO: 549 - DNA, 30 bp, Artificial Sequence
  Mouse C8 light chain variable complementarity determining region 3 (CDR3) sequence
caacacattcgggaactgaccaggagtgaa

SEQ ID NO: 550 - protein, 10 aa, Artificial Sequence
  Mouse C8 light chain variable complementarity determining region 3 (CDR3) sequence
QHIRELTRSE

SEQ ID NO: 551 - DNA, 303 bp, Artificial Sequence
  NCBI germline z00023 light chain variable region sequence
gacatcgtgatgacccagtctccagactccctggctgtgtctctgggcgagagggccaccatcaactgcaagtccagccagagtgttttatacagctccaacaataagaactacttagcttggtaccagcagaaaccaggacagcctcctaagctgctcatttactgggcatctacccgggaatccggggtccctgaccgattcagtggcagcgggtctgggacagatttcactctcaccatcagcagcctgcaggctgaagatgtggcagtttattactgtcagcaatattatagtactcct

SEQ ID NO: 552 - protein, 101 aa, Artificial Sequence
  NCBI germline z00023 light chain variable region sequence
DIVMTQSPDSLAVSLGERATINCKSSQSVLYSSNNKNYLAWYQQKPGQPPKLLIYWASTRESGVPDRFSGSGSGTDFTLTISSLQAEDVAVYYCQQYYSTP

SEQ ID NO: 553 - DNA, 69 bp, Artificial Sequence
  NCBI germline z00023 light chain variable framework region 1 (FWR1) acid sequence
gacatcgtgatgacccagtctccagactccctggctgtgtctctgggcgagagggccaccatcaactgc

SEQ ID NO: 554 - protein, 23 aa, Artificial Sequence
  NCBI germline z00023 light chain variable framework region 1 (FWR1) acid sequence
DIVMTQSPDSLAVSLGERATINC

SEQ ID NO: 555 - DNA, 51 bp, Artificial Sequence
  NCBI germline z00023 light chain variable complementarity determining regions 1 (CDR1) sequence
aagtccagccagagtgttttatacagctccaacaataagaactacttagct

SEQ ID NO: 556 - protein, 17 aa, Artificial Sequence
  NCBI germline z00023 light chain variable complementarity determining regions 1 (CDR1) sequence
KSSQSVLYSSNNKNYLA

SEQ ID NO: 557 - DNA, 45 bp, Artificial Sequence
  NCBI germline z00023 light chain variable framework region 2 (FWR2) sequence
tggtaccagcagaaaccaggacagcctcctaagctgctcatttac

SEQ ID NO: 558 - protein, 15 aa, Artificial Sequence
  NCBI germline z00023 light chain variable framework region 2 (FWR2) sequence
WYQQKPGQPPKLLIY

SEQ ID NO: 559 - DNA, 21 bp, Artificial Sequence
  NCBI germline z00023 light chain variable complementarity determining regions 2 (CDR2) sequence
tgggcatctacccgggaatcc

SEQ ID NO: 560 - protein, 7 aa, Artificial Sequence
  NCBI germline z00023 light chain variable complementarity determining regions 2 (CDR2) sequence
WASTRES

SEQ ID NO: 561 - DNA, 96 bp, Artificial Sequence
  NCBI germline z00023 light chain variable framework region 3 (FWR3) sequence
ggggtccctgaccgattcagtggcagcgggtctgggacagatttcactctcaccatcagcagcctgcaggctgaagatgtggcagtttattactgt

SEQ ID NO: 562 - protein, 32 aa, Artificial Sequence
  NCBI germline z00023 light chain variable framework region 3 (FWR3) sequence
GVPDRFSGSGSGTDFTLTISSLQAEDVAVYYC

SEQ ID NO: 563 - DNA, 21 bp, Artificial Sequence
  NCBI germline z00023 light chain variable complementarity determining regions3 (CDR3) sequence
cagcaatattatagtactcct

SEQ ID NO: 564 - protein, 7 aa, Artificial Sequence
  NCBI germline z00023 light chain variable complementarity determining regions3 (CDR3) sequence
QQYYSTP

SEQ ID NO: 565 - DNA, 342 bp, Artificial Sequence
  Humanized C8 light chain variable region sequence
gacatcgtgatgacccagtctccagactccctggctgtgtctctgggcgagagggccaccatcaactgcagggccagcaagagtgttagcaccagcggctacagctacatgcactggtaccagcagaaaccaggacagcctcctaagctgctcatttacctggtgtctaacctggaatccggggtccctgaccgattcagtggcagcgggtctgggacagatttcactctcaccatcagcagcctgcaggctgaagatgtggcagtttattactgtcaacacattcgggaactgaccaggagtgaattcggcggagggaccaaggtggagatcaaacgaact

SEQ ID NO: 566 - protein, 114 aa, Artificial Sequence
  Humanized C8 light chain variable region sequence
DIVMTQSPDSLAVSLGERATINCRASKSVSTSGYSYMHWYQQKPGQPPKLLIYLVSNLESGVPDRFSGSGSGTDFTLTISSLQAEDVAVYYCQHIRELTRSEFGGGTKVEIKRT

SEQ ID NO: 567 - DNA, 69 bp, Artificial Sequence; identical to SEQ ID NO: 553
  Humanized C8 light chain variable framework region 1 (FWR1) sequence

SEQ ID NO: 568 - protein, 23 aa, Artificial Sequence
  Humanized C8 light chain variable framework region 1 (FWR1) sequence
DIVMTQSPDSLAVSLGERATINC

SEQ ID NO: 569 - DNA, 42 bp, Artificial Sequence
  Humanized C8 light chain variable complementarity determining region 1 (CDR1) sequence
agggccagcaagagtgttagcaccagcggctacagctacatg

SEQ ID NO: 570 - protein, 14 aa, Artificial Sequence
  Humanized C8 light chain variable complementarity determining region 1 (CDR1) sequence
RASKSVSTSGYSYM

SEQ ID NO: 571 - DNA, 48 bp, Artificial Sequence
  Humanized C8 light chain variable framework region 2 (FWR2) sequence
cactggtaccagcagaaaccaggacagcctcctaagctgctcatttac

SEQ ID NO: 572 - protein, 16 aa, Artificial Sequence
  Humanized C8 light chain variable framework region 2 (FWR2) sequence
HWYQQKPGQPPKLLIY

SEQ ID NO: 573 - DNA, 21 bp, Artificial Sequence
  Humanized C8 light chain variable complementarity determining region 2 (CDR2) sequence
ctggtgtctaacctggaatcc

SEQ ID NO: 574 - protein, 7 aa, Artificial Sequence
  Humanized C8 light chain variable complementarity determining region 2 (CDR2) sequence
LVSNLES

SEQ ID NO: 575 - DNA, 96 bp, Artificial Sequence; identical to SEQ ID NO: 561
  Humanized C8 light chain variable framework region 3 (FWR3) sequence

SEQ ID NO: 576 - protein, 32 aa, Artificial Sequence; identical to SEQ ID NO: 562
  Humanized C8 light chain variable framework region 3 (FWR3) sequence

SEQ ID NO: 577 - DNA, 30 bp, Artificial Sequence; identical to SEQ ID NO: 549
  Humanized C8 light chain variable complementarity determining region 3 (CDR3) sequence

SEQ ID NO: 578 - protein, 10 aa, Artificial Sequence
  Humanized C8 light chain variable complementarity determining region 3 (CDR3) sequence
QHIRELTRSE

SEQ ID NO: 579 - DNA, 666 bp, Artificial Sequence
  Humanized C8 Lambda light chain sequence
gacatcgtgatgacccagtctccagactccctggctgtgtctctgggcgagagggccaccatcaactgcagggccagcaagagtgttagcaccagcggctacagctacatgcactggtaccagcagaaaccaggacagcctcctaagctgctcatttacctggtgtctaacctggaatccggggtccctgaccgattcagtggcagcgggtctgggacagatttcactctcaccatcagcagcctgcaggctgaagatgtggcagtttattactgtcaacacattcgggaactgaccaggagtgaattcggcggagggaccaaggtggagatcaaacgaactggtcagcccaaggctgccccctcggtcactctgttcccgccctcctctgaggagcttcaagccaacaaggccacactggtgtgtctcataagtgacttctacccgggagccgtgacagtggcctggaaggcagatagcagccccgtcaaggcgggagtggagaccaccacaccctccaaacaaagcaacaacaagtacgcggccagcagctatctgagcctgacgcctgagcagtggaagtcccacagaagctacagctgccaggtcacgcatgaagggagcaccgtggagaagacagtggcccctacagaatgttcatagtaa

SEQ ID NO: 580 - protein, 220 aa, Artificial Sequence
  Humanized C8 Lambda light chain sequence
DIVMTQSPDSLAVSLGERATINCRASKSVSTSGYSYMHWYQQKPGQPPKLLIYLVSNLESGVPDRFSGSGSGTDFTLTISSLQAEDVAVYYCQHIRELTRSEFGGGTKVEIKRTGQPKAAPSVTLFPPSSEELQANKATLVCLISDFYPGAVTVAWKADSSPVKAGVETTTPSKQSNNKYAASSYLSLTPEQWKSHRSYSCQVTHEGSTVEKTVAPTECS

SEQ ID NO: 581 - DNA, 666 bp, Artificial Sequence
  Humanized C8 Kappa light chain sequence
gacatcgtgatgacccagtctccagactccctggctgtgtctctgggcgagagggccaccatcaactgcagggccagcaagagtgttagcaccagcggctacagctacatgcactggtaccagcagaaaccaggacagcctcctaagctgctcatttacctggtgtctaacctggaatccggggtccctgaccgattcagtggcagcgggtctgggacagatttcactctcaccatcagcagcctgcaggctgaagatgtggcagtttattactgtcaacacattcgggaactgaccaggagtgaattcggcggagggaccaaggtggagatcaaacgaactacggtggctgcaccatctgtcttcatcttcccgccatctgatgagcagttgaaatctggaactgcctctgttgtgtgcctgctgaataacttctatcccagagaggccaaagtacagtggaaggtggataacgccctccaatcgggtaactcccaggagagtgtcacagagcaggacagcaaggacagcacctacagcctcagcagcaccctgacgctgagcaaagcagactacgagaaacacaaagtctacgcctgcgaagtcacccatcagggcctgagctcgcccgtcacaaagagcttcaacaggggagagtgttagtaa

SEQ ID NO: 582 - protein, 220 aa, Artificial Sequence
  Humanized C8 Kappa light chain sequence
DIVMTQSPDSLAVSLGERATINCRASKSVSTSGYSYMHWYQQKPGQPPKLLIYLVSNLESGVPDRFSGSGSGTDFTLTISSLQAEDVAVYYCQHIRELTRSEFGGGTKVEIKRTTVAAPSVFIFPPSDEQLKSGTASVVCLLNNFYPREAKVQWKVDNALQSGNSQESVTEQDSKDSTYSLSSTLTLSKADYEKHKVYACEVTHQGLSSPVTKSFNRGEC

SEQ ID NO: 583 - DNA, 815 bp, Artificial Sequence
  Humanized C8 Kappa light chain gBLOCk sequence
agctggctaggtaagcttggtaccgagctcggatccacgccaccatggagacagacacactcctgctatgggtactgctgctctgggttccaggttccactggtgacgacatcgtgatgacccagtctccagactccctggctgtgtctctgggcgagagggccaccatcaactgcagggccagcaagagtgttagcaccagcggctacagctacatgcactggtaccagcagaaaccaggacagcctcctaagctgctcatttacctggtgtctaacctggaatccggggtccctgaccgattcagtggcagcgggtctgggacagatttcactctcaccatcagcagcctgcaggctgaagatgtggcagtttattactgtcaacacattcgggaactgaccaggagtgaattcggcggagggaccaaggtggagatcaaacgaactacggtggctgcaccatctgtcttcatcttcccgccatctgatgagcagttgaaatctggaactgcctctgttgtgtgcctgctgaataacttctatcccagagaggccaaagtacagtggaaggtggataacgccctccaatcgggtaactcccaggagagtgtcacagagcaggacagcaaggacagcacctacagcctcagcagcaccctgacgctgagcaaagcagactacgagaaacacaaagtctacgcctgcgaagtcacccatcagggcctgagctcgcccgtcacaaagagcttcaacaggggagagtgttagtaagtttaaacccgctgatcagcctcgactgtgccttctagttgc

SEQ ID NO: 584 - DNA, 942 bp, Artificial Sequence
  CAR-T E6 CD8 sequence
gaggtccagctggttgagagtggcggtgggctggttaagcctggcggctccctgcggctgagctgcgccgcgagtggatttactttcagccgatatgggatgagttgggtgcggcaagctcccgggaagaggctggaatgggtctcaacaatctccggggggggcacttacatctattaccccgactcagtcaaggggagatttaccatttcacgagacaacgctaagaataccctgtatttgcagatgaattctctgagagcagaggacacagctgtttactattgtacccgcgacaactatggcaggaactacgactacggtatggactattggggacaagggacattggttacagtgagcagtggcggcgggggcagcggaggaggaggcagcggtggggggggcagcgagatagtgctcacgcagtcacccgcgactctcagtctctcacctggggaacgagctaccctgacgtgctctgctacctcctcagtgtcatatattcactggtatcagcaacggcccgggcagtcccctagattgctcatttatagtacctctaatctggcctcaggtatccctgcacgattttctggatctggttcaggttctgattacaccctcactatctctagcctggagcctgaagactttgccgtttattactgccagcagaggtctagctccccattcacctttgggagtgggaccaaggttgaaattaaaacgacaaccccggcccccagaccaccaacgccagcccccaccatcgccagccaacccctgtctctgagaccagaagcctgtaggcctgccgccggtggagctgtgcacacaagaggactggatttcgcctgtgatatctacatttgggccccgctcgcaggcacatgtggagtgctcctcctctccctggtgattaccctgtactgctgataa

SEQ ID NO: 585 - protein, 312 aa, Artificial Sequence
  CAR-T E6 CD8 sequence
EVQLVESGGGLVKPGGSLRLSCAASGFTFSRYGMSWVRQAPGKRLEWVSTISGGGTYIYYPDSVKGRFTISRDNAKNTLYLQMNSLRAEDTAVYYCTRDNYGRNYDYGMDYWGQGTLVTVSSGGGGSGGGGSGGGGSEIVLTQSPATLSLSPGERATLTCSATSSVSYIHWYQQRPGQSPRLLIYSTSNLASGIPARFSGSGSGSDYTLTISSLEPEDFAVYYCQQRSSSPFTFGSGTKVEIKTTTPAPRPPTPAPTIASQPLSLRPEACRPAAGGAVHTRGLDFACDIYIWAPLAGTCGVLLLSLVITLYC

SEQ ID NO: 586 - DNA, 960 bp, Artificial Sequence
  CAR-T C2 CD8 sequence
gaagtgcagctcgtagagagtggcgggggactggtgaagcccggtggaagcctcagactcagttgcgccgcctcaggtttcactttttcaggttacgccatgtcctgggtaagacaggcaccggggaaaggactcgagtgggtgtctactatcagctcaggaggcacttatatatattatcctgactctgtaaaaggccgatttacgatttctcgcgacaatgcaaagaactccctctacctccaaatgaacagtcttagggcagaagacactgctgtatactattgtgcacgcctcggcggcgacaactactacgagtactttgacgtgtgggggaaagggactaccgtgacagtttcaagcggaggaggtggctcaggtggaggcgggtcaggggggggaggaagtgatattgtgctcacacaatccccagcctccctggctgtgtctcccggccaacgcgctacaattacatgtcgggcctccaaaagcgtgagcaccagcggctacagctacatgcactggtatcaacagaaaccaggacaaccccccaaactgttgatttatctcgcttcaaacttggagtccggcgtgcctgcgcgcttttcagggagtgggagcggcacagattttacgctgactatcaaccccgtagaagcaaacgatacagcgaattattattgtcaacattcccgggaactcccctttacgttcggcgggggcacaaaggtcgaaattaagagaaccacgacaaccccggcccccagaccaccaacgccagcccccaccatcgccagccaacccctgtctctgagaccagaagcctgtaggcctgccgccggtggagctgtgcacacaagaggactggatttcgcctgtgatatctacatttgggccccgctcgcaggcacatgtggagtgctcctcctctccctggtgattaccctgtactgctgataa

SEQ ID NO: 587 - protein, 318 aa, Artificial Sequence
  CAR-T C2 CD8 sequence
EVQLVESGGGLVKPGGSLRLSCAASGFTFSGYAMSWVRQAPGKGLEWVSTISSGGTYIYYPDSVKGRFTISRDNAKNSLYLQMNSLRAEDTAVYYCARLGGDNYYEYFDVWGKGTTVTVSSGGGGSGGGGSGGGGSDIVLTQSPASLAVSPGQRATITCRASKSVSTSGYSYMHWYQQKPGQPPKLLIYLASNLESGVPARFSGSGSGTDFTLTINPVEANDTANYYCQHSRELPFTFGGGTKVEIKRTTTTPAPRPPTPAPTIASQPLSLRPEACRPAAGGAVHTRGLDFACDIYIWAPLAGTCGVLLLSLVITLYC

SEQ ID NO: 588 - DNA, 339 bp, Artificial Sequence
  CD8/4-1BB sequence
acgacaaccccggcccccagaccaccaacgccagcccccaccatcgccagccaacccctgtctctgagaccagaagcctgtaggcctgccgccggtggagctgtgcacacaagaggactggatttcgcctgtgatatctacatttgggccccgctcgcaggcacatgtggagtgctcctcctctccctggtgattaccctgtactgcaaaaggggccgcaaaaaactcctttacatttttaagcagccttttatgaggccagtacagacgactcaagaggaagacgggtgctcatgccgctttcctgaggaggaggaaggagggtgcgaactgtgataa

SEQ ID NO: 589 - protein, 111 aa, Artificial Sequence
  CD8/4-1BB sequence
TTTPAPRPPTPAPTIASQPLSLRPEACRPAAGGAVHTRGLDFACDIYIWAPLAGTCGVLLLSLVITLYCKRGRKKLLYIFKQPFMRPVQTTQEEDGCSCRFPEEEEGGCEL

SEQ ID NO: 590 - DNA, 336 bp, Artificial Sequence
  CD8/CD28 sequence
acgacaaccccggcccccagaccaccaacgccagcccccaccatcgccagccaacccctgtctctgagaccagaagcctgtaggcctgccgccggtggagctgtgcacacaagaggactggatttcgcctgtgatatctacatttgggccccgctcgcaggcacatgtggagtgctcctcctctccctggtgattaccctgtactgcagaagcaagcggtctcggctcctgcattctgattacatgaacatgaccccaagaagaccaggccccaccaggaaacattaccagccctacgctccgccacgcgacttcgctgcctaccggtcctgataa

SEQ ID NO: 591 - protein, 110 aa, Artificial Sequence
  CD8/CD28 sequence
TTTPAPRPPTPAPTIASQPLSLRPEACRPAAGGAVHTRGLDFACDIYIWAPLAGTCGVLLLSLVITLYCRSKRSRLLHSDYMNMTPRRPGPTRKHYQPYAPPRDFAAYRS

SEQ ID NO: 592 - DNA, 549 bp, Artificial Sequence
  CD8/CD3z sequence
acgacaaccccggcccccagaccaccaacgccagcccccaccatcgccagccaacccctgtctctgagaccagaagcctgtaggcctgccgccggtggagctgtgcacacaagaggactggatttcgcctgtgatatctacatttgggccccgctcgcaggcacatgtggagtgctcctcctctccctggtgattaccctgtactgccgcgttaagttctcccgatcagccgacgcgcctgcttacaagcagggccagaaccaactgtacaacgagctgaatctcggtagacgggaagagtacgacgtgttggacaaacggagaggccgcgacccagaaatgggcggcaagcctcgcaggaaaaacccccaggagggactgtacaatgagttgcagaaagataagatggcagaagcttatagcgagatcggaatgaagggggaaaggagacgagggaaaggacacgacggcctttatcagggcctgtccacagcaacaaaagatacgtatgacgccctccatatgcaggcacttccaccacggtgataa

SEQ ID NO: 593 - protein, 181 aa, Artificial Sequence
  CD8/CD3z sequence
TTTPAPRPPTPAPTIASQPLSLRPEACRPAAGGAVHTRGLDFACDIYIWAPLAGTCGVLLLSLVITLYCRVKFSRSADAPAYKQGQNQLYNELNLGRREEYDVLDKRRGRDPEMGGKPRRKNPQEGLYNELQKDKMAEAYSEIGMKGERRRGKGHDGLYQGLSTATKDTYDALHMQALPPR

SEQ ID NO: 594 - DNA, 672 bp, Artificial Sequence
  CD8/CD28/CD3z sequence
acgacaaccccggcccccagaccaccaacgccagcccccaccatcgccagccaacccctgtctctgagaccagaagcctgtaggcctgccgccggtggagctgtgcacacaagaggactggatttcgcctgtgatatctacatttgggccccgctcgcaggcacatgtggagtgctcctcctctccctggtgattaccctgtactgcagaagcaagcggtctcggctcctgcattctgattacatgaacatgaccccaagaagaccaggccccaccaggaaacattaccagccctacgctccgccacgcgacttcgctgcctaccggtcccgcgttaagttctcccgatcagccgacgcgcctgcttacaagcagggccagaaccaactgtacaacgagctgaatctcggtagacgggaagagtacgacgtgttggacaaacggagaggccgcgacccagaaatgggcggcaagcctcgcaggaaaaacccccaggagggactgtacaatgagttgcagaaagataagatggcagaagcttatagcgagatcggaatgaagggggaaaggagacgagggaaaggacacgacggcctttatcagggcctgtccacagcaacaaaagatacgtatgacgccctccatatgcaggcacttccaccacggtgataa

SEQ ID NO: 595 - protein, 222 aa, Artificial Sequence
  CD8/CD28/CD3z sequence
TTTPAPRPPTPAPTIASQPLSLRPEACRPAAGGAVHTRGLDFACDIYIWAPLAGTCGVLLLSLVITLYCRSKRSRLLHSDYMNMTPRRPGPTRKHYQPYAPPRDFAAYRSRVKFSRSADAPAYKQGQNQLYNELNLGRREEYDVLDKRRGRDPEMGGKPRRKNPQEGLYNELQKDKMAEAYSEIGMKGERRRGKGHDGLYQGLSTATKDTYDALHMQALPPR

SEQ ID NO: 596 - DNA, 675 bp, Artificial Sequence
  CD8/4-1BB/CD3z sequence
acgacaaccccggcccccagaccaccaacgccagcccccaccatcgccagccaacccctgtctctgagaccagaagcctgtaggcctgccgccggtggagctgtgcacacaagaggactggatttcgcctgtgatatctacatttgggccccgctcgcaggcacatgtggagtgctcctcctctccctggtgattaccctgtactgcaaaaggggccgcaaaaaactcctttacatttttaagcagccttttatgaggccagtacagacgactcaagaggaagacgggtgctcatgccgctttcctgaggaggaggaaggagggtgcgaactgcgcgttaagttctcccgatcagccgacgcgcctgcttacaagcagggccagaaccaactgtacaacgagctgaatctcggtagacgggaagagtacgacgtgttggacaaacggagaggccgcgacccagaaatgggcggcaagcctcgcaggaaaaacccccaggagggactgtacaatgagttgcagaaagataagatggcagaagcttatagcgagatcggaatgaagggggaaaggagacgagggaaaggacacgacggcctttatcagggcctgtccacagcaacaaaagatacgtatgacgccctccatatgcaggcacttccaccacggtgataa

SEQ ID NO: 597 - protein, 223 aa, Artificial Sequence
  CD8/4-1BB/CD3z sequence
TTTPAPRPPTPAPTIASQPLSLRPEACRPAAGGAVHTRGLDFACDIYIWAPLAGTCGVLLLSLVITLYCKRGRKKLLYIFKQPFMRPVQTTQEEDGCSCRFPEEEEGGCELRVKFSRSADAPAYKQGQNQLYNELNLGRREEYDVLDKRRGRDPEMGGKPRRKNPQEGLYNELQKDKMAEAYSEIGMKGERRRGKGHDGLYQGLSTATKDTYDALHMQALPPR

SEQ ID NO: 598 - DNA, 798 bp, Artificial Sequence
  CD8/CD28/4-1BB/CD3z sequence
acgacaaccccggcccccagaccaccaacgccagcccccaccatcgccagccaacccctgtctctgagaccagaagcctgtaggcctgccgccggtggagctgtgcacacaagaggactggatttcgcctgtgatatctacatttgggccccgctcgcaggcacatgtggagtgctcctcctctccctggtgattaccctgtactgcagaagcaagcggtctcggctcctgcattctgattacatgaacatgaccccaagaagaccaggccccaccaggaaacattaccagccctacgctccgccacgcgacttcgctgcctaccggtccaaaaggggccgcaaaaaactcctttacatttttaagcagccttttatgaggccagtacagacgactcaagaggaagacgggtgctcatgccgctttcctgaggaggaggaaggagggtgcgaactgcgcgttaagttctcccgatcagccgacgcgcctgcttacaagcagggccagaaccaactgtacaacgagctgaatctcggtagacgggaagagtacgacgtgttggacaaacggagaggccgcgacccagaaatgggcggcaagcctcgcaggaaaaacccccaggagggactgtacaatgagttgcagaaagataagatggcagaagcttatagcgagatcggaatgaagggggaaaggagacgagggaaaggacacgacggcctttatcagggcctgtccacagcaacaaaagatacgtatgacgccctccatatgcaggcacttccaccacggtgataa

SEQ ID NO: 599 - protein, 264 aa, Artificial Sequence
  CD8/CD28/4-1BB/CD3z sequence
TTTPAPRPPTPAPTIASQPLSLRPEACRPAAGGAVHTRGLDFACDIYIWAPLAGTCGVLLLSLVITLYCRSKRSRLLHSDYMNMTPRRPGPTRKHYQPYAPPRDFAAYRSKRGRKKLLYIFKQPFMRPVQTTQEEDGCSCRFPEEEEGGCELRVKFSRSADAPAYKQGQNQLYNELNLGRREEYDVLDKRRGRDPEMGGKPRRKNPQEGLYNELQKDKMAEAYSEIGMKGERRRGKGHDGLYQGLSTATKDTYDALHMQALPPR

SEQ ID NO: 600 - DNA, 1482 bp, Artificial Sequence
  CAR-T C3 4-1BB/CD3z sequence
atggccctgcccgtgaccgctttgctgctccccctggcgctgctgctgcacgccgccaggccacaggttcagctggtgcagtctggagctgaggtgaagaagcctggggcctcagtgaaggtctcctgcaaggcttctggttacacctttaccgactacgccatgaactgggtgcgacaggcccctggacaagggcttgagtggatgggagtgatcagcaccttcagcggtaacacaaacttcaaccagaagttcaagggcagagtcaccatgaccacagacacatccacgagcacagcctacatggagctgaggagcctgagatctgacgacacggccgtgtattactgtgcgagaagcgactactacggcccatacttcgactactggggccagggcaccaccctgaccgtgtccagcggcggtggcggatccggcggtggcggatccggcggtggcggatccgatattgtgatgacccagactccactctctctgtccgtcacccctggacagccggcctccatctcctgcaggtctagtcagaccattgtccatagtaatggaaacacctatttggagtggtacctgcagaagccaggccagtctccacagctcctgatctataaggtttccaaccggttctctggagtgccagataggttcagtggcagcgggtcagggacagatttcacactgaaaatcagccgggtggaggctgaggatgttggggtttattactgcttccaaggtagccacgtgcctttcaccttcggcggagggaccaaggtggagatcaaacgaactacgacaaccccggcccccagaccaccaacgccagcccccaccatcgccagccaacccctgtctctgagaccagaagcctgtaggcctgccgccggtggagctgtgcacacaagaggactggatttcgcctgtgatatctacatttgggccccgctcgcaggcacatgtggagtgctcctcctctccctggtgattaccctgtactgcaaaaggggccgcaaaaaactcctttacatttttaagcagccttttatgaggccagtacagacgactcaagaggaagacgggtgctcatgccgctttcctgaggaggaggaaggagggtgcgaactgcgcgttaagttctcccgatcagccgacgcgcctgcttacaagcagggccagaaccaactgtacaacgagctgaatctcggtagacgggaagagtacgacgtgttggacaaacggagaggccgcgacccagaaatgggcggcaagcctcgcaggaaaaacccccaggagggactgtacaatgagttgcagaaagataagatggcagaagcttatagcgagatcggaatgaagggggaaaggagacgagggaaaggacacgacggcctttatcagggcctgtccacagcaacaaaagatacgtatgacgccctccatatgcaggcacttccaccacggtgataa

SEQ ID NO: 601 - protein, 471 aa, Artificial Sequence
  CAR-T C3 4-1BB/CD3z sequence
QVQLVQSGAEVKKPGASVKVSCKASGYTFTDYAMNWVRQAPGQGLEWMGVISTFSGNTNFNQKFKGRVTMTTDTSTSTAYMELRSLRSDDTAVYYCARSDYYGPYFDYWGQGTTLTVSSGGGGSGGGGSGGGGSDIVMTQTPLSLSVTPGQPASISCRSSQTIVHSNGNTYLEWYLQKPGQSPQLLIYKVSNRFSGVPDRFSGSGSGTDFTLKISRVEAEDVGVYYCFQGSHVPFTFGGGTKVEIKRTTTTPAPRPPTPAPTIASQPLSLRPEACRPAAGGAVHTRGLDFACDIYIWAPLAGTCGVLLLSLVITLYCKRGRKKLLYIFKQPFMRPVQTTQEEDGCSCRFPEEEEGGCELRVKFSRSADAPAYKQGQNQLYNELNLGRREEYDVLDKRRGRDPEMGGKPRRKNPQEGLYNELQKDKMAEAYSEIGMKGERRRGKGHDGLYQGLSTATKDTYDALHMQALPPR

SEQ ID NO: 602 - DNA, 567 bp, Artificial Sequence
  C3 CAR gBLOCK 1 sequence
atccacgctgttttgacctccatagaagattctagagctagctgtagagcttggtaccgagggccaccatggccctgcccgtgaccgctttgctgctccccctggcgctgctgctgcacgccgccaggccacaggttcagctggtgcagtctggagctgaggtgaagaagcctggggcctcagtgaaggtctcctgcaaggcttctggttacacctttaccgactacgccatgaactgggtgcgacaggcccctggacaagggcttgagtggatgggagtgatcagcaccttcagcggtaacacaaacttcaaccagaagttcaagggcagagtcaccatgaccacagacacatccacgagcacagcctacatggagctgaggagcctgagatctgacgacacggccgtgtattactgtgcgagaagcgactactacggcccatacttcgactactggggccagggcaccaccctgaccgtgtccagcggcggtggcggatccggcggtggcggatccggcggtggcggatccgatattgtgatgacccagactccactctctctgt

SEQ ID NO: 603 - DNA, 509 bp, Artificial Sequence
  C3 CAR gBLOCK 2 sequence
tattgtgatgacccagactccactctctctgtccgtcacccctggacagccggcctccatctcctgcaggtctagtcagaccattgtccatagtaatggaaacacctatttggagtggtacctgcagaagccaggccagtctccacagctcctgatctataaggtttccaaccggttctctggagtgccagataggttcagtggcagcgggtcagggacagatttcacactgaaaatcagccgggtggaggctgaggatgttggggtttattactgcttccaaggtagccacgtgcctttcaccttcggcggagggaccaaggtggagatcaaacgaactacgacaaccccggcccccagaccaccaacgccagcccccaccatcgccagccaacccctgtctctgagaccagaagcctgtaggcctgccgccggtggagctgtgcacacaagaggactggatttcgcctgtgatatctacatttgggccccgctcgcaggcacatgtg

SEQ ID NO: 604 - DNA, 455 bp, Artificial Sequence
  E6 scFV gBLOCK 1 sequence
tgctctgggttccaggttccactggtgacgcggcccagccggccgaggtgcagctggtggagtctgggggaggcctggtcaagcctggggggtccctgagactctcctgtgcagcctctggattcaccttcagtaggtatggcatgagctgggtccgccaggctccagggaagaggctggagtgggtctcaaccattagtggcggaggcacctacatatactacccagactcagtgaagggccgattcaccatctccagagacaacgccaagaacaccctgtatctgcaaatgaacagcctgagagccgaggacacggctgtgtattactgtaccagagataactatggccgcaactatgattatggcatggattattggggccagggcaccctggtgaccgtgagcagcggcggtggcggatccggcggtggcggatccggcggtggcggatcc

SEQ ID NO: 605 - DNA, 432 bp, Artificial Sequence
  E6 scFV gBLOCK 2 sequence
ggcggtggcggatccggcggtggcggatccggcggtggcggatccgaaattgtgttgacacagtctccagccaccctgtctttgtctccaggggaaagagccaccctcacctgcagcgccaccagcagtgttagctacatccactggtaccaacagaggcctggccagagccccaggctcctcatctatagcacctccaacctggccagcggcatcccagccaggttcagtggcagtgggtctgggagcgactacactctcaccatcagcagcctagagcctgaagattttgcagtttattactgtcagcagcgtagcagctcccctttcacctttggcagcggcaccaaagtggaaattaaaaccggtcatcatcaccatcaccactgataagtttaaacccgctgatcagcctcgactgtgccttctagt

SEQ ID NO: 606 - DNA, 1359 bp, Artificial Sequence
  CAR-T C2 CD3z sequence
atggccttgccagtgacggccctgctgctgccattggctcttctgttgcacgctgccaggcctgaagtgcagctcgtagagagtggcgggggactggtgaagcccggtggaagcctcagactcagttgcgccgcctcaggtttcactttttcaggttacgccatgtcctgggtaagacaggcaccggggaaaggactcgagtgggtgtctactatcagctcaggaggcacttatatatattatcctgactctgtaaaaggccgatttacgatttctcgcgacaatgcaaagaactccctctacctccaaatgaacagtcttagggcagaagacactgctgtatactattgtgcacgcctcggcggcgacaactactacgagtactttgacgtgtgggggaaagggactaccgtgacagtttcaagcggaggaggtggctcaggtggaggcgggtcaggggggggaggaagtgatattgtgctcacacaatccccagcctccctggctgtgtctcccggccaacgcgctacaattacatgtcgggcctccaaaagcgtgagcaccagcggctacagctacatgcactggtatcaacagaaaccaggacaaccccccaaactgttgatttatctcgcttcaaacttggagtccggcgtgcctgcgcgcttttcagggagtgggagcggcacagattttacgctgactatcaaccccgtagaagcaaacgatacagcgaattattattgtcaacattcccgggaactcccctttacgttcggcgggggcacaaaggtcgaaattaagagaaccacgacaaccccggcccccagaccaccaacgccagcccccaccatcgccagccaacccctgtctctgagaccagaagcctgtaggcctgccgccggtggagctgtgcacacaagaggactggatttcgcctgtgatatctacatttgggccccgctcgcaggcacatgtggagtgctcctcctctccctggtgattaccctgtactgccgcgttaagttctcccgatcagccgacgcgcctgcttacaagcagggccagaaccaactgtacaacgagctgaatctcggtagacgggaagagtacgacgtgttggacaaacggagaggccgcgacccagaaatgggcggcaagcctcgcaggaaaaacccccaggagggactgtacaatgagttgcagaaagataagatggcagaagcttatagcgagatcggaatgaagggggaaaggagacgagggaaaggacacgacggcctttatcagggcctgtccacagcaacaaaagatacgtatgacgccctccatatgcaggcacttccaccacggtgataa

SEQ ID NO: 607 - protein, 451 aa, Artificial Sequence
  CAR-T C2 CD3z sequence
MALPVTALLLPLALLLHAARPEVQLVESGGGLVKPGGSLRLSCAASGFTFSGYAMSWVRQAPGKGLEWVSTISSGGTYIYYPDSVKGRFTISRDNAKNSLYLQMNSLRAEDTAVYYCARLGGDNYYEYFDVWGKGTTVTVSSGGGGSGGGGSGGGGSDIVLTQSPASLAVSPGQRATITCRASKSVSTSGYSYMHWYQQKPGQPPKLLIYLASNLESGVPARFSGSGSGTDFTLTINPVEANDTANYYCQHSRELPFTFGGGTKVEIKRTTTTPAPRPPTPAPTIASQPLSLRPEACRPAAGGAVHTRGLDFACDIYIWAPLAGTCGVLLLSLVITLYCRVKFSRSADAPAYKQGQNQLYNELNLGRREEYDVLDKRRGRDPEMGGKPRRKNPQEGLYNELQKDKMAEAYSEIGMKGERRRGKGHDGLYQGLSTATKDTYDALHMQALPPR

SEQ ID NO: 608 - DNA, 1482 bp, Artificial Sequence
  CAR-T C2 CD28/CD3z sequence
atggccttgccagtgacggccctgctgctgccattggctcttctgttgcacgctgccaggcctgaagtgcagctcgtagagagtggcgggggactggtgaagcccggtggaagcctcagactcagttgcgccgcctcaggtttcactttttcaggttacgccatgtcctgggtaagacaggcaccggggaaaggactcgagtgggtgtctactatcagctcaggaggcacttatatatattatcctgactctgtaaaaggccgatttacgatttctcgcgacaatgcaaagaactccctctacctccaaatgaacagtcttagggcagaagacactgctgtatactattgtgcacgcctcggcggcgacaactactacgagtactttgacgtgtgggggaaagggactaccgtgacagtttcaagcggaggaggtggctcaggtggaggcgggtcaggggggggaggaagtgatattgtgctcacacaatccccagcctccctggctgtgtctcccggccaacgcgctacaattacatgtcgggcctccaaaagcgtgagcaccagcggctacagctacatgcactggtatcaacagaaaccaggacaaccccccaaactgttgatttatctcgcttcaaacttggagtccggcgtgcctgcgcgcttttcagggagtgggagcggcacagattttacgctgactatcaaccccgtagaagcaaacgatacagcgaattattattgtcaacattcccgggaactcccctttacgttcggcgggggcacaaaggtcgaaattaagagaaccacgacaaccccggcccccagaccaccaacgccagcccccaccatcgccagccaacccctgtctctgagaccagaagcctgtaggcctgccgccggtggagctgtgcacacaagaggactggatttcgcctgtgatatctacatttgggccccgctcgcaggcacatgtggagtgctcctcctctccctggtgattaccctgtactgcagaagcaagcggtctcggctcctgcattctgattacatgaacatgaccccaagaagaccaggccccaccaggaaacattaccagccctacgctccgccacgcgacttcgctgcctaccggtcccgcgttaagttctcccgatcagccgacgcgcctgcttacaagcagggccagaaccaactgtacaacgagctgaatctcggtagacgggaagagtacgacgtgttggacaaacggagaggccgcgacccagaaatgggcggcaagcctcgcaggaaaaacccccaggagggactgtacaatgagttgcagaaagataagatggcagaagcttatagcgagatcggaatgaagggggaaaggagacgagggaaaggacacgacggcctttatcagggcctgtccacagcaacaaaagatacgtatgacgccctccatatgcaggcacttccaccacggtgataa

SEQ ID NO: 609 - protein, 492 aa, Artificial Sequence
  CAR-T C2 CD28/CD3z sequence
MALPVTALLLPLALLLHAARPEVQLVESGGGLVKPGGSLRLSCAASGFTFSGYAMSWVRQAPGKGLEWVSTISSGGTYIYYPDSVKGRFTISRDNAKNSLYLQMNSLRAEDTAVYYCARLGGDNYYEYFDVWGKGTTVTVSSGGGGSGGGGSGGGGSDIVLTQSPASLAVSPGQRATITCRASKSVSTSGYSYMHWYQQKPGQPPKLLIYLASNLESGVPARFSGSGSGTDFTLTINPVEANDTANYYCQHSRELPFTFGGGTKVEIKRTTTTPAPRPPTPAPTIASQPLSLRPEACRPAAGGAVHTRGLDFACDIYIWAPLAGTCGVLLLSLVITLYCRSKRSRLLHSDYMNMTPRRPGPTRKHYQPYAPPRDFAAYRSRVKFSRSADAPAYKQGQNQLYNELNLGRREEYDVLDKRRGRDPEMGGKPRRKNPQEGLYNELQKDKMAEAYSEIGMKGERRRGKGHDGLYQGLSTATKDTYDALHMQALPPR

SEQ ID NO: 610 - DNA, 1485 bp, Artificial Sequence
  CAR-T C2 4-1BB/CD3z sequence
atggccttgccagtgacggccctgctgctgccattggctcttctgttgcacgctgccaggcctgaagtgcagctcgtagagagtggcgggggactggtgaagcccggtggaagcctcagactcagttgcgccgcctcaggtttcactttttcaggttacgccatgtcctgggtaagacaggcaccggggaaaggactcgagtgggtgtctactatcagctcaggaggcacttatatatattatcctgactctgtaaaaggccgatttacgatttctcgcgacaatgcaaagaactccctctacctccaaatgaacagtcttagggcagaagacactgctgtatactattgtgcacgcctcggcggcgacaactactacgagtactttgacgtgtgggggaaagggactaccgtgacagtttcaagcggaggaggtggctcaggtggaggcgggtcaggggggggaggaagtgatattgtgctcacacaatccccagcctccctggctgtgtctcccggccaacgcgctacaattacatgtcgggcctccaaaagcgtgagcaccagcggctacagctacatgcactggtatcaacagaaaccaggacaaccccccaaactgttgatttatctcgcttcaaacttggagtccggcgtgcctgcgcgcttttcagggagtgggagcggcacagattttacgctgactatcaaccccgtagaagcaaacgatacagcgaattattattgtcaacattcccgggaactcccctttacgttcggcgggggcacaaaggtcgaaattaagagaaccacgacaaccccggcccccagaccaccaacgccagcccccaccatcgccagccaacccctgtctctgagaccagaagcctgtaggcctgccgccggtggagctgtgcacacaagaggactggatttcgcctgtgatatctacatttgggccccgctcgcaggcacatgtggagtgctcctcctctccctggtgattaccctgtactgcaaaaggggccgcaaaaaactcctttacatttttaagcagccttttatgaggccagtacagacgactcaagaggaagacgggtgctcatgccgctttcctgaggaggaggaaggagggtgcgaactgcgcgttaagttctcccgatcagccgacgcgcctgcttacaagcagggccagaaccaactgtacaacgagctgaatctcggtagacgggaagagtacgacgtgttggacaaacggagaggccgcgacccagaaatgggcggcaagcctcgcaggaaaaacccccaggagggactgtacaatgagttgcagaaagataagatggcagaagcttatagcgagatcggaatgaagggggaaaggagacgagggaaaggacacgacggcctttatcagggcctgtccacagcaacaaaagatacgtatgacgccctccatatgcaggcacttccaccacggtgataa

SEQ ID NO: 611 - protein, 493 aa, Artificial Sequence
  CAR-T C2 4-1BB/CD3z sequence
MALPVTALLLPLALLLHAARPEVQLVESGGGLVKPGGSLRLSCAASGFTFSGYAMSWVRQAPGKGLEWVSTISSGGTYIYYPDSVKGRFTISRDNAKNSLYLQMNSLRAEDTAVYYCARLGGDNYYEYFDVWGKGTTVTVSSGGGGSGGGGSGGGGSDIVLTQSPASLAVSPGQRATITCRASKSVSTSGYSYMHWYQQKPGQPPKLLIYLASNLESGVPARFSGSGSGTDFTLTINPVEANDTANYYCQHSRELPFTFGGGTKVEIKRTTTTPAPRPPTPAPTIASQPLSLRPEACRPAAGGAVHTRGLDFACDIYIWAPLAGTCGVLLLSLVITLYCKRGRKKLLYIFKQPFMRPVQTTQEEDGCSCRFPEEEEGGCELRVKFSRSADAPAYKQGQNQLYNELNLGRREEYDVLDKRRGRDPEMGGKPRRKNPQEGLYNELQKDKMAEAYSEIGMKGERRRGKGHDGLYQGLSTATKDTYDALHMQALPPR

SEQ ID NO: 612 - DNA, 1470 bp, Artificial Sequence
  CAR-T C2 OX40/CD3z sequence
atggccttgccagtgacggccctgctgctgccattggctcttctgttgcacgctgccaggcctgaagtgcagctcgtagagagtggcgggggactggtgaagcccggtggaagcctcagactcagttgcgccgcctcaggtttcactttttcaggttacgccatgtcctgggtaagacaggcaccggggaaaggactcgagtgggtgtctactatcagctcaggaggcacttatatatattatcctgactctgtaaaaggccgatttacgatttctcgcgacaatgcaaagaactccctctacctccaaatgaacagtcttagggcagaagacactgctgtatactattgtgcacgcctcggcggcgacaactactacgagtactttgacgtgtgggggaaagggactaccgtgacagtttcaagcggaggaggtggctcaggtggaggcgggtcaggggggggaggaagtgatattgtgctcacacaatccccagcctccctggctgtgtctcccggccaacgcgctacaattacatgtcgggcctccaaaagcgtgagcaccagcggctacagctacatgcactggtatcaacagaaaccaggacaaccccccaaactgttgatttatctcgcttcaaacttggagtccggcgtgcctgcgcgcttttcagggagtgggagcggcacagattttacgctgactatcaaccccgtagaagcaaacgatacagcgaattattattgtcaacattcccgggaactcccctttacgttcggcgggggcacaaaggtcgaaattaagagaaccacgacaaccccggcccccagaccaccaacgccagcccccaccatcgccagccaacccctgtctctgagaccagaagcctgtaggcctgccgccggtggagctgtgcacacaagaggactggatttcgcctgtgatatctacatttgggccccgctcgcaggcacatgtggagtgctcctcctctccctggtgattaccctgtactgccggagggaccagaggctgccccccgatgcccacaagccccctgggggaggcagtttccggacccccatccaagaggagcaggccgacgcccactccaccctggccaagatccgcgttaagttctcccgatcagccgacgcgcctgcttacaagcagggccagaaccaactgtacaacgagctgaatctcggtagacgggaagagtacgacgtgttggacaaacggagaggccgcgacccagaaatgggcggcaagcctcgcaggaaaaacccccaggagggactgtacaatgagttgcagaaagataagatggcagaagcttatagcgagatcggaatgaagggggaaaggagacgagggaaaggacacgacggcctttatcagggcctgtccacagcaacaaaagatacgtatgacgccctccatatgcaggcacttccaccacggtgataa

SEQ ID NO: 613 - protein, 488 aa, Artificial Sequence
  CAR-T C2 OX40/CD3z sequence
MALPVTALLLPLALLLHAARPEVQLVESGGGLVKPGGSLRLSCAASGFTFSGYAMSWVRQAPGKGLEWVSTISSGGTYIYYPDSVKGRFTISRDNAKNSLYLQMNSLRAEDTAVYYCARLGGDNYYEYFDVWGKGTTVTVSSGGGGSGGGGSGGGGSDIVLTQSPASLAVSPGQRATITCRASKSVSTSGYSYMHWYQQKPGQPPKLLIYLASNLESGVPARFSGSGSGTDFTLTINPVEANDTANYYCQHSRELPFTFGGGTKVEIKRTTTTPAPRPPTPAPTIASQPLSLRPEACRPAAGGAVHTRGLDFACDIYIWAPLAGTCGVLLLSLVITLYCRRDQRLPPDAHKPPGGGSFRTPIQEEQADAHSTLAKIRVKFSRSADAPAYKQGQNQLYNELNLGRREEYDVLDKRRGRDPEMGGKPRRKNPQEGLYNELQKDKMAEAYSEIGMKGERRRGKGHDGLYQGLSTATKDTYDALHMQALPPR

SEQ ID NO: 614 - DNA, 1593 bp, Artificial Sequence
  CAR-T C2 CD28/OX40/CD3z sequence
atggccttgccagtgacggccctgctgctgccattggctcttctgttgcacgctgccaggcctgaagtgcagctcgtagagagtggcgggggactggtgaagcccggtggaagcctcagactcagttgcgccgcctcaggtttcactttttcaggttacgccatgtcctgggtaagacaggcaccggggaaaggactcgagtgggtgtctactatcagctcaggaggcacttatatatattatcctgactctgtaaaaggccgatttacgatttctcgcgacaatgcaaagaactccctctacctccaaatgaacagtcttagggcagaagacactgctgtatactattgtgcacgcctcggcggcgacaactactacgagtactttgacgtgtgggggaaagggactaccgtgacagtttcaagcggaggaggtggctcaggtggaggcgggtcaggggggggaggaagtgatattgtgctcacacaatccccagcctccctggctgtgtctcccggccaacgcgctacaattacatgtcgggcctccaaaagcgtgagcaccagcggctacagctacatgcactggtatcaacagaaaccaggacaaccccccaaactgttgatttatctcgcttcaaacttggagtccggcgtgcctgcgcgcttttcagggagtgggagcggcacagattttacgctgactatcaaccccgtagaagcaaacgatacagcgaattattattgtcaacattcccgggaactcccctttacgttcggcgggggcacaaaggtcgaaattaagagaaccacgacaaccccggcccccagaccaccaacgccagcccccaccatcgccagccaacccctgtctctgagaccagaagcctgtaggcctgccgccggtggagctgtgcacacaagaggactggatttcgcctgtgatatctacatttgggccccgctcgcaggcacatgtggagtgctcctcctctccctggtgattaccctgtactgcagaagcaagcggtctcggctcctgcattctgattacatgaacatgaccccaagaagaccaggccccaccaggaaacattaccagccctacgctccgccacgcgacttcgctgcctaccggtcccggagggaccagaggctgccccccgatgcccacaagccccctgggggaggcagtttccggacccccatccaagaggagcaggccgacgcccactccaccctggccaagatccgcgttaagttctcccgatcagccgacgcgcctgcttacaagcagggccagaaccaactgtacaacgagctgaatctcggtagacgggaagagtacgacgtgttggacaaacggagaggccgcgacccagaaatgggcggcaagcctcgcaggaaaaacccccaggagggactgtacaatgagttgcagaaagataagatggcagaagcttatagcgagatcggaatgaagggggaaaggagacgagggaaaggacacgacggcctttatcagggcctgtccacagcaacaaaagatacgtatgacgccctccatatgcaggcacttccaccacggtgataa

SEQ ID NO: 615 - protein, 529 aa, Artificial Sequence
  CAR-T C2 CD28/OX40/CD3z sequence
MALPVTALLLPLALLLHAARPEVQLVESGGGLVKPGGSLRLSCAASGFTFSGYAMSWVRQAPGKGLEWVSTISSGGTYIYYPDSVKGRFTISRDNAKNSLYLQMNSLRAEDTAVYYCARLGGDNYYEYFDVWGKGTTVTVSSGGGGSGGGGSGGGGSDIVLTQSPASLAVSPGQRATITCRASKSVSTSGYSYMHWYQQKPGQPPKLLIYLASNLESGVPARFSGSGSGTDFTLTINPVEANDTANYYCQHSRELPFTFGGGTKVEIKRTTTTPAPRPPTPAPTIASQPLSLRPEACRPAAGGAVHTRGLDFACDIYIWAPLAGTCGVLLLSLVITLYCRSKRSRLLHSDYMNMTPRRPGPTRKHYQPYAPPRDFAAYRSRRDQRLPPDAHKPPGGGSFRTPIQEEQADAHSTLAKIRVKFSRSADAPAYKQGQNQLYNELNLGRREEYDVLDKRRGRDPEMGGKPRRKNPQEGLYNELQKDKMAEAYSEIGMKGERRRGKGHDGLYQGLSTATKDTYDALHMQALPPR

SEQ ID NO: 616 - DNA, 1452 bp, Artificial Sequence
  CAR-T E6 OX40/CD3z sequence
atggccctgcccgtgaccgctttgctgctccccctggcgctgctgctgcacgccgccaggccagaggtccagctggttgagagtggcggtgggctggttaagcctggcggctccctgcggctgagctgcgccgcgagtggatttactttcagccgatatgggatgagttgggtgcggcaagctcccgggaagaggctggaatgggtctcaacaatctccggggggggcacttacatctattaccccgactcagtcaaggggagatttaccatttcacgagacaacgctaagaataccctgtatttgcagatgaattctctgagagcagaggacacagctgtttactattgtacccgcgacaactatggcaggaactacgactacggtatggactattggggacaagggacattggttacagtgagcagtggcggcgggggcagcggaggaggaggcagcggtggggggggcagcgagatagtgctcacgcagtcacccgcgactctcagtctctcacctggggaacgagctaccctgacgtgctctgctacctcctcagtgtcatatattcactggtatcagcaacggcccgggcagtcccctagattgctcatttatagtacctctaatctggcctcaggtatccctgcacgattttctggatctggttcaggttctgattacaccctcactatctctagcctggagcctgaagactttgccgtttattactgccagcagaggtctagctccccattcacctttgggagtgggaccaaggttgaaattaaaacgacaaccccggcccccagaccaccaacgccagcccccaccatcgccagccaacccctgtctctgagaccagaagcctgtaggcctgccgccggtggagctgtgcacacaagaggactggatttcgcctgtgatatctacatttgggccccgctcgcaggcacatgtggagtgctcctcctctccctggtgattaccctgtactgccggagggaccagaggctgccccccgatgcccacaagccccctgggggaggcagtttccggacccccatccaagaggagcaggccgacgcccactccaccctggccaagatccgcgttaagttctcccgatcagccgacgcgcctgcttacaagcagggccagaaccaactgtacaacgagctgaatctcggtagacgggaagagtacgacgtgttggacaaacggagaggccgcgacccagaaatgggcggcaagcctcgcaggaaaaacccccaggagggactgtacaatgagttgcagaaagataagatggcagaagcttatagcgagatcggaatgaagggggaaaggagacgagggaaaggacacgacggcctttatcagggcctgtccacagcaacaaaagatacgtatgacgccctccatatgcaggcacttccaccacggtgataa

SEQ ID NO: 617 - protein, 482 aa, Artificial Sequence
  CAR-T E6 OX40/CD3z sequence
MALPVTALLLPLALLLHAARPEVQLVESGGGLVKPGGSLRLSCAASGFTFSRYGMSWVRQAPGKRLEWVSTISGGGTYIYYPDSVKGRFTISRDNAKNTLYLQMNSLRAEDTAVYYCTRDNYGRNYDYGMDYWGQGTLVTVSSGGGGSGGGGSGGGGSEIVLTQSPATLSLSPGERATLTCSATSSVSYIHWYQQRPGQSPRLLIYSTSNLASGIPARFSGSGSGSDYTLTISSLEPEDFAVYYCQQRSSSPFTFGSGTKVEIKTTTPAPRPPTPAPTIASQPLSLRPEACRPAAGGAVHTRGLDFACDIYIWAPLAGTCGVLLLSLVITLYCRRDQRLPPDAHKPPGGGSFRTPIQEEQADAHSTLAKIRVKFSRSADAPAYKQGQNQLYNELNLGRREEYDVLDKRRGRDPEMGGKPRRKNPQEGLYNELQKDKMAEAYSEIGMKGERRRGKGHDGLYQGLSTATKDTYDALHMQALPPR

SEQ ID NO: 618 - DNA, 1575 bp, Artificial Sequence
  CAR-T E6 CD28/OX40/CD3z sequence
atggccctgcccgtgaccgctttgctgctccccctggcgctgctgctgcacgccgccaggccagaggtccagctggttgagagtggcggtgggctggttaagcctggcggctccctgcggctgagctgcgccgcgagtggatttactttcagccgatatgggatgagttgggtgcggcaagctcccgggaagaggctggaatgggtctcaacaatctccggggggggcacttacatctattaccccgactcagtcaaggggagatttaccatttcacgagacaacgctaagaataccctgtatttgcagatgaattctctgagagcagaggacacagctgtttactattgtacccgcgacaactatggcaggaactacgactacggtatggactattggggacaagggacattggttacagtgagcagtggcggcgggggcagcggaggaggaggcagcggtggggggggcagcgagatagtgctcacgcagtcacccgcgactctcagtctctcacctggggaacgagctaccctgacgtgctctgctacctcctcagtgtcatatattcactggtatcagcaacggcccgggcagtcccctagattgctcatttatagtacctctaatctggcctcaggtatccctgcacgattttctggatctggttcaggttctgattacaccctcactatctctagcctggagcctgaagactttgccgtttattactgccagcagaggtctagctccccattcacctttgggagtgggaccaaggttgaaattaaaacgacaaccccggcccccagaccaccaacgccagcccccaccatcgccagccaacccctgtctctgagaccagaagcctgtaggcctgccgccggtggagctgtgcacacaagaggactggatttcgcctgtgatatctacatttgggccccgctcgcaggcacatgtggagtgctcctcctctccctggtgattaccctgtactgcagaagcaagcggtctcggctcctgcattctgattacatgaacatgaccccaagaagaccaggccccaccaggaaacattaccagccctacgctccgccacgcgacttcgctgcctaccggtcccggagggaccagaggctgccccccgatgcccacaagccccctgggggaggcagtttccggacccccatccaagaggagcaggccgacgcccactccaccctggccaagatccgcgttaagttctcccgatcagccgacgcgcctgcttacaagcagggccagaaccaactgtacaacgagctgaatctcggtagacgggaagagtacgacgtgttggacaaacggagaggccgcgacccagaaatgggcggcaagcctcgcaggaaaaacccccaggagggactgtacaatgagttgcagaaagataagatggcagaagcttatagcgagatcggaatgaagggggaaaggagacgagggaaaggacacgacggcctttatcagggcctgtccacagcaacaaaagatacgtatgacgccctccatatgcaggcacttccaccacggtgataa

SEQ ID NO: 619 - protein, 523 aa, Artificial Sequence
  CAR-T E6 CD28/OX40/CD3z sequence
MALPVTALLLPLALLLHAARPEVQLVESGGGLVKPGGSLRLSCAASGFTFSRYGMSWVRQAPGKRLEWVSTISGGGTYIYYPDSVKGRFTISRDNAKNTLYLQMNSLRAEDTAVYYCTRDNYGRNYDYGMDYWGQGTLVTVSSGGGGSGGGGSGGGGSEIVLTQSPATLSLSPGERATLTCSATSSVSYIHWYQQRPGQSPRLLIYSTSNLASGIPARFSGSGSGSDYTLTISSLEPEDFAVYYCQQRSSSPFTFGSGTKVEIKTTTPAPRPPTPAPTIASQPLSLRPEACRPAAGGAVHTRGLDFACDIYIWAPLAGTCGVLLLSLVITLYCRSKRSRLLHSDYMNMTPRRPGPTRKHYQPYAPPRDFAAYRSRRDQRLPPDAHKPPGGGSFRTPIQEEQADAHSTLAKIRVKFSRSADAPAYKQGQNQLYNELNLGRREEYDVLDKRRGRDPEMGGKPRRKNPQEGLYNELQKDKMAEAYSEIGMKGERRRGKGHDGLYQGLSTATKDTYDALHMQALPPR

SEQ ID NO: 620 - protein, 43 aa, Artificial Sequence
  MUC1 FRAGMENT
SNIKFRPGSVVVQLTLAFREGTINVHDVETQFNQYKTEAASRY

SEQ ID NO: 621 - protein, 35 aa, Artificial Sequence
  MUC1 FRAGMENT
SVVVQLTLAFREGTINVHDVETQFNQYKTEAASRY

SEQ ID NO: 622 - protein, 24 aa, Artificial Sequence
  Cytoplasmic MUC1 truncated segment
VQLTLAFREGTINVHDVETQFNQY

SEQ ID NO: 623 - protein, 24 aa, Artificial Sequence
  Cytoplasmic MUC1 truncated segment
SNIKFRPGSVVVQLTLAFREGTIN

SEQ ID NO: 624 - DNA, 28 bp, Artificial Sequence
  Primer
attctaagcttgggccaccatggaactg

SEQ ID NO: 625 - DNA, 41 bp, Artificial Sequence
  Primer
tctagagtttaaacttactatttacccggagacagggagag

SEQ ID NO: 626 - DNA, 41 bp, Artificial Sequence
  Primer
agtatggcccagccggccgaggtgcagctggtggagtctgg

SEQ ID NO: 627 - DNA, 26 bp, Artificial Sequence
  Primer
tagaaggcacagtcgaggctgatcag

SEQ ID NO: 628 - DNA, 27 bp, Artificial Sequence
  Primer
attctaagcttgggccaccatggaagc

SEQ ID NO: 629 - DNA, 40 bp, Artificial Sequence
  Primer
tctagagtttaaacttactaacactctcccctgttgaagc

SEQ ID NO: 630 - DNA, 43 bp, Artificial Sequence
  Primer
agtatggcccagccggccgaaattgtgttgacacagtctccag

SEQ ID NO: 631 - DNA, 26 bp, Artificial Sequence
  Primer
tagaaggcacagtcgaggctgatcag

SEQ ID NO: 632 - DNA, 33 bp, Artificial Sequence
  Primer
actgtcatatggaggtgcagctggtggagtctg

SEQ ID NO: 633 - DNA, 37 bp, Artificial Sequence
  Primer
actgtctcgagtttaatttccactttggtgccgctgc

SEQ ID NO: 634 - DNA, 33 bp, Artificial Sequence; identical to SEQ ID NO: 632
  Primer

SEQ ID NO: 635 - DNA, 37 bp, Artificial Sequence
  Primer
actgtaccggttttaatttccactttggtgccgctgc

SEQ ID NO: 636 - DNA, 29 bp, Artificial Sequence
  Primer
cttcttcctcaggagcaagctcaccgtgg

SEQ ID NO: 637 - DNA, 18 bp, Artificial Sequence
  Primer
gagccgtcggagtccagc

SEQ ID NO: 638 - DNA, 18 bp, Artificial Sequence
  Primer
gcacctgaactcctgggg

SEQ ID NO: 639 - DNA, 22 bp, Artificial Sequence
  Primer
tttaatttccactttggtgccg

SEQ ID NO: 640 - DNA, 32 bp, Artificial Sequence
  Primer
cgcggctagcttaagcttggtaccgagggcca

SEQ ID NO: 641 - DNA, 36 bp, Artificial Sequence
  Primer
cgcggcggccgcctgatcagcgggtttaaacttatc

1.-37. (canceled)

38. A single chain variable fragment (scFv) comprising a heavy and light chain variable regions connected via a linker, further comprising CDRs of antibodies that bind to MUC1* extracellular domain.

39. The scFv according to claim 38, wherein the CDRs of the anti-MUC1* antibody are derived from the MN-E6, MN-C2, MN-C3 or MN-C8 antibodies.

40. The scFv according to claim 39, wherein the CDRs of the anti-MUC1* antibody are derived from humanized MN-E6, MN-C2, MN-C3 or MN-C8 antibodies.

41. A scFv according to claim 38, selected from the group of SEQ ID NOS:233, 235 and 237 (E6).

42. A scFv according to claim 38, selected from the group of SEQ ID NOS:239, 241, and 243 (C2).

43. A scFv according to claim 38, selected from the group of SEQ ID NOS:245, 247, and 249 (C3).

44. A scFv according to claim 38, selected from the group of SEQ ID NOS:251, 253, and 255 (C8).

45. A chimeric antigen receptor (CAR) comprising a scFv or a humanized variable region that binds to the extracellular domain of a MUC1 that is devoid of tandem repeats, a linker molecule, a transmembrane domain and a cytoplasmic domain.

46. The CAR according to claim 45, wherein the single chain antibody fragment binds to
(i) PSMGFR region of MUC1,
(ii) PSMGFR peptide,
(iii) a peptide having amino acid sequence
(SEQ ID NO: 620)
SNIKFRPGSVVVQLTLAFREGTINVHDVETQFNQYKTEAASRY;
(iv) a peptide having amino acid sequence of
(SEQ ID NO: 621)
SVVVQLTLAFREGTINVHDVETQFNQYKTEAASRY;
(v) a peptide having amino acid sequence of
(SEQ ID NO: 622)
VQLTLAFREGTINVHDVETQFNQY;
or
(vi) a peptide having amino acid sequence of
(SEQ ID NO: 623)
SNIKFRPGSVVVQLTLAFREGTIN.

47. The CAR according to claim 46, comprising portions of any of the variable regions set forth in claims 25 to 32 or combination thereof in the extracellular domain, a transmembrane region and a cytoplasmic tail that comprises sequence motifs that signal immune system activation.

48. The CAR as in claim 45, in which the extracellular domain is comprised of humanized single chain antibody fragments of an MN-E6 scFv, MN-C2 scFv, MN-C3 scFv or MN-C8 scFv.

49. The CAR as in claim 48, in which the extracellular domain is comprised of humanized single chain antibody fragments of an MN-E6 scFv set forth as SEQ ID NOS: 233, 235, or 237), MN-C2 scFv (SEQ ID NOS:239, 241, or 243), MN-C3 scFv (SEQ ID NOS: 245, 247, or 249) or MN-C8 scFv (SEQ ID NOS:251, 253, or 255).

50. The CAR as in claim 45, in which the cytoplasmic tail is comprised of one or more of signaling sequence motifs CD3-zeta, CD27, CD28, 4-1BB, OX40, CD30, CD40, PD-1, ICAm-1, LFA-1, ICOS, CD2, CD5, or CD7.

51. The CAR as in claim 45, wherein its sequence is CARMN-E6 CD3z (SEQ ID NOS:295), CARMN-E6 CD28/CD3z (SEQ ID NOS:298); CARMN-E6 4-1BB/CD3z (SEQ ID NOS:301); CARMN-E6 OX40/CD3z (SEQ ID NOS:617); CARMN-E6 CD28/4-1BB/CD3z (SEQ ID NOS:304); CARMN-E6 CD28/OX40/CD3z (SEQ ID NOS:619); CAR MN-C2 CD3z (SEQ ID NOS:607); CAR MN-C2 CD28/CD3z (SEQ ID NOS:609); CAR MN-C2 4-1BB/CD3z (SEQ ID NOS:611); CAR MN-C2 OX40/CD3z (SEQ ID NOS:613); CAR MN-C2 CD28/4-1BB/CD3z (SEQ ID NOS:307); or CAR MN-C2 CD28/OX40/CD3z (SEQ ID NOS:615).

52. A cell comprising a CAR with an extracellular domain that binds to MUC1* transfected or transduced cell.

53. The cell according to claim 52, wherein the cell comprising the CAR is immune system cell.

54. The cell according to claim 53, wherein the immune system cell comprising the CAR is T cell.

55. The cell according to claim 53, wherein the immune system cell comprising the CAR is dendritic cell.

56. The cell according to claim 53, wherein the immune system cell comprising the CAR is mast cell.

57. A CAR molecule in which the extracellular domain unit recognizes a peptide.

58. The CAR molecule according to claim 57, wherein the peptide is PSMGFR (SEQ ID NO:2).

59. The CAR molecule according to claim 57, wherein the peptide is a peptide derived from NME7.

60. The CAR molecule according to claim 59, wherein the peptide is
NME7A peptide 1 (A domain):
(SEQ ID NO: 7)
MLSRKEALDFHVDHQS;
NME7A peptide 2 (A domain):
(SEQ ID NO: 8)
SGVARTDASES;
NME7B peptide 1 (B domain):
(SEQ ID NO: 9)
DAGFEISAMQMFNMDRVNVE;
NME7B peptide 2 (B domain):
(SEQ ID NO: 10)
EVYKGVVTEYHDMVTE;
or
NME7B peptide 3 (B domain):
(SEQ ID NO: 11)
AIFGKTKIQNAVHCTDLPEDGLLEVQYFF.

61. A composition comprising at least two CARs with different extracellular domain units transfected into the same cell.

62. A composition comprising at least two CARs with different extracellular domain units transfected into the same cell, wherein one CAR does not have a targeting recognition unit and the other CAR does have a targeting recognition unit.

63. The composition comprising at least two CARs according to claim 61, wherein one of the extracellular domain recognition units binds to MUC1* extracellular domain.

64. The composition comprising at least two CARs according to claim 61, wherein one of the extracellular domain recognition units binds PD-1.

65. The composition comprising at least two CARs according to claim 61, wherein one of the extracellular domain recognition units is an antibody fragment and the other is a peptide.

66. The composition comprising at least two CARs according to claim 61, wherein one is an anti-MUC1* scFv chosen from the group consisting of scFv of MN-E6 antibody, scFv of MN-C2 antibody, scFv of MN-C3 antibody or scFv of MN-C8 antibody and the other is a peptide derived from NME7 or chosen from the group consisting of
NME7A peptide 1 (A domain):
(SEQ ID NO: 7)
MLSRKEALDFHVDHQS;
NME7A peptide 2 (A domain):
(SEQ ID NO: 8)
SGVARTDASES;
NME7B peptide 1 (B domain):
(SEQ ID NO: 9)
DAGFEISAMQMFNMDRVNVE;
NME7B peptide 2 (B domain):
(SEQ ID NO: 10)
EVYKGVVTEYHDMVTE;
and
NME7B peptide 3 (B domain):
(SEQ ID NO: 11)
AIFGKTKIQNAVHCTDLPEDGLLEVQYFF.

67.-94. (canceled)

95. A method for treating a patient diagnosed with, suspected of having, or at risk of developing a MUC1 positive or MUC1* positive cancer, comprising administering an effective amount of immune cells that have been transduced with a MUC1* targeting CAR.

96. The method according to claim 95, wherein the immune cells are T cells isolated from a patient, which are then transduced with CARs wherein the targeting head of the CAR binds to MUC1*, and after expansion of transduced T cells, the CAR T cells are administered in an effective amount to the patient.

97. The method according to claim 95, wherein the immune cells are T cells isolated from a patient, which are then transduced with CARs wherein the targeting head of the CAR comprises portions of huMN-E6, huMN-C2, huMN-C3 or huMN-C8, and after optional expansion of transduced T cells, the CAR T cells are administered in an effective amount to the patient.
